(19) United States
(12) Patent Application Publication
(10) Pub. No.: US 2024/0018499 A1
(43) Pub. Date: Jan. 18, 2024

(54) ACE2 Fusion Proteins and Uses Thereof

(71) Applicant: Formycon AG, Martinsried/Planegg (DE)

(72) Inventors: Alwin Reiter, München (DE); Carsten Brockmeyer, Marzling (DE); Florian Wolschin, München (DE)

(21) Appl. No.: 18/033,793

(22) PCT Filed: Oct. 29, 2021
(86) PCT No.: PCT/EP2021/080130

§ 371 Date: Apr. 25, 2023

(30) Foreign Application Priority Data
Oct. 29, 2020 (EP) 20204774.2
Nov. 27, 2020 (EP) 20210297.6
Mar. 24, 2021 (EP) 21164684.9
Apr. 26, 2021 (EP) 21170519.9

(51) Int. Cl. C12N 9/48; A61K 38/48; A61P 31/14

(52) U.S. Cl. CPC C12N 9/485; C12Y 304/17023; A61K 38/4813; A61P 31/14; C07K 2319/30; A61K 38/00

(57) ABSTRACT

The present invention relates to fusion proteins of ACE2 with IgG Fc and the medical use of these fusion proteins, in particular in the prevention or treatment of infections with coronaviruses such as SARS-CoV-2.

### FIELD OF THE INVENTION

[0001] The present invention relates to fusion proteins of ACE2 with IgG Fc and the medical use of these fusion proteins, in particular in the prevention or treatment of infections with coronaviruses such as SARS-CoV-2.

### BACKGROUND OF THE INVENTION

[0002] ACE2 (angiotensin converting enzyme 2) is a key metalloprotease of the renin-angiotensin system with a catalytic zinc atom in the centre (Donoghue et al. (2002) Circ. Res. 87: e1-e9). Full-length ACE2 consists of an N-terminal extracellular peptidase domain, a collectrin-like domain, a single transmembrane helix and a short intracellular segment. It acts to cleave Angiotensin II to produce Angiotensin (1-7) and Angiotensin Ito produce Angiotensin (1-9) which is then processed by other enzymes to become Angiotensin (1-7). ACE2 acts to lower the blood pressure and counters the activity of ACE in order to maintain a balance in the Ras/MAS system. Accordingly, it is a promising target for the treatment of cardiovascular diseases.

[0003] Recently, ACE2 has gained much attention as a receptor for coronaviruses and in particular the novel coronavirus SARS-CoV-2. SARS-CoV-2 is a coronavirus which was first discovered in December 2019 in Wuhan, China, but spread rapidly all over the world, leading to a world-wide pandemic. On 22 May 2020, the Johns Hopkins University counted more than 5 millions of confirmed infections worldwide, causing the death of more than 330,000 people. The pandemic led to a lock-down in many countries with very significant economic and social effects.

[0004] It was shown that ACE2 functions as a receptor for SARS-CoV (Li et al. (2003) Nature 426: 450-454; Prakabaran et al. (2004) Biochem. Biophys. Res. Comm. 314: 235-241) and for SARS-CoV-2 (Yan et al. (2020) Science 367: 1444-1485). Further, entry of SARS-CoV-2 into the respiratory cells depends on ACE2 and the serine protease TMPRSS2 (Hoffmann et al. (2020) Cell 181: 1-10).

[0005] In view of the important role of ACE2 for virus entry into the cell, it was proposed to use soluble ACE2 for blocking SARS binding to the cell (WO 2005/032487; WO 2006/122819). The same approach was also suggested for the treatment of infections with SARS-CoV-2 (Kruse (2020) F1000Res. 9:72). Clinical trials with a soluble form of ACE2 in the treatment of infections with SARS-CoV-2 have been initiated by the company Apeiron (Pharmazeutische Zeitung, 10 Apr. 2020) and the first results showed that one patient with severe Covid-19 caused by SARS-CoV-2 recovered fast upon treatment with soluble ACE2 (Zoufaly et al. (2020) The Lancet Respiratory Medicine 8: 1154-1158, available at https://doi.org/10.1016/S2213-2600(20)30418-5).

[0006] However, isolated receptor domains are typically characterized by a low stability and plasma half-life. For the soluble form of ACE2 a dose-dependent terminal half-life of 10 hours was shown (Haschke et al. (2013) Clin. Pharmacokinet. 52: 783-792). In view of these results, it was decided to administer the soluble form of ACE2 as twice-daily infusion in a later study (Khan et al. (2017) Critical Care 21: 234). However, an administration of more than one time per day is inconvenient both for the patient and the medical personnel.

[0007] A fusion protein of ACE2 consisting of the extracellular domain of either enzymatically active or enzymatically inactive ACE2 linked to the Fc domain of human IgG1 was constructed and tested. It was shown that both constructs potently neutralized both SARS-CoV and SARS-CoV-2 and inhibited S (Spike) protein-mediated fusion (Lei et al. (2020) Nature Communications 11: 2070). Further, a fusion protein called COVIDTRAP™ or STI-4398 was developed for clinical testing by the company Sorrento Therapeutics (see https://www.globenewswire.com/news-release/2020/03/20/2003957/0/en/SORRENTO-DEVELOPS-STI-4398-COVIDTRAP-PROTEIN-FOR-POTENTIAL-PREVENTION-AND-TREATMENT-OF-SARS-COV-2-CORONAVIRUS-DISEASE-COVID-19.html). Liu et al. (2020) Int. J. Biol. Macromol. 165: 1626-1633, available at https://www.biorxiv.org/content/10.1101/2020.08.13.248351v1.full.pdf, describe fusion proteins of wild-type ACE2 and nine ACE2 mutants affecting catalytic activity of ACE2 with the Fc region of human IgG1. However, the interaction of the Fc domain of human IgG1 with Fc gamma receptors on immune cells may enhance the virus infection (Perlman and Dandekar (2005) Nat. Rev. Immunol. 5(12): 917-927; Chen et al. (2020) Current Tropical Medicine Reports 3:1-4).

[0008] Tada et al. (2020), available at https://www.biorxiv.org/content/10.1101/2020.09.16.300319v1.full, disclose an “ACE2 microbody” in which the extracellular domain of catalytically inactive ACE2 is fused to Fc domain 3 of the immunoglobulin heavy chain.

[0009] Svilenov et al. (2020), available at https://www.researchsquare.com/article/rs-459941/v1 and PCT/EP2021/063692 describe ACE2 fusion proteins with the Fc domain of IgG1 and IgG4.

[0010] European patent application EP21188832.6 discloses ACE2 fusion proteins with the Fc domain of IgM and IgG2.

[0011] WO 2021/170113, WO 2021/183404, US 2021/0284716 and WO 2021/189772 also disclose fusion proteins of ACE2 with the Fc part of different immunoglobulins.

[0012] Zhang et al. (2021) Cell Discovery 7: 65 describe that a fusion protein of the extracellular domain of ACE2 with the Fc part of IgG1 protected mice from SARS-CoV2 infection, as determined by reduced viral replication, weight loss, histological changes and inflammation in the lungs. Additionally, it is shown that unlike antibodies targeting the receptor-binding domain of SARS-CoV2 treatment with the fusion protein does not induce the development of escape mutants.

[0013] Hence, there is still a need for agents which can be used for the treatment and/or prevention of infections with coronaviruses, in particular with SARS-CoV-2.

### SUMMARY OF THE INVENTION

[0014] The present invention provides a fusion protein comprising a first part comprising a fragment of human ACE2 or a variant of said fragment, said human ACE2 having the amino acid sequence according to SEQ ID No. 1, and a second part comprising a variant of the Fc portion of human IgG1, said variant having the amino acid sequence according to SEQ ID No. 19.

[0015] In one embodiment the first part and the second part are linked by the amino acid sequence according to SEQ ID No. 15.

[0016] The fragment of human ACE2 may consist of a protein with the amino acid sequence according to SEQ ID No. 2 or may be the extracellular domain of ACE2 consisting of a protein with the amino acid sequence according to SEQ ID No. 3.

[0017] In one embodiment the variant of the human ACE2 fragment is an enzymatically inactive variant of human ACE2.

[0018] The enzymatically inactive variant of human ACE2 may comprise a H374N and a H378N mutation, the numbering referring to SEQ ID No. 1.or a mutation at position 273, preferably a R273A mutation, the numbering referring to SEQ ID No. 1.

[0019] In one embodiment, the enzymatically inactive variant of human ACE2 consists of a protein having the amino acid sequence according to SEQ ID No. 91 or 92.

[0020] In one embodiment, the enzymatically inactive variant of human ACE2 consists of a protein having the amino acid sequence according to SEQ ID No. 24 or 25.

[0021] In one embodiment, the variant of the human ACE2 fragment comprises a S645C mutation, the numbering referring to SEQ ID No. 1. In particular, the variant of the human ACE2 fragment may consist of a protein having the amino acid sequence according to SEQ ID No. 28 or 29.

[0022] In one embodiment, the variant of the human ACE2 fragment further comprises a H374N and a H378N mutation, the numbering referring to SEQ ID No. 1. In particular, the variant of the human ACE2 fragment may consist of a protein having the amino acid sequence according to SEQ ID No. 32 or 33.

[0023] In one embodiment, the variant of the human ACE2 fragment further comprises a mutation at position 273, preferably a R273A mutation, the numbering referring to SEQ ID No. 1. In particular, the variant of the human ACE2 fragment may consist of a protein having the amino acid sequence according to SEQ ID No. 36 or 37.

[0024] The present invention further provides a fusion protein comprising:
[0025] (a) a first part comprising a variant of a fragment of human ACE2, said human ACE2 having the amino acid sequence according to SEQ ID No. 1, wherein the variant of the human ACE2 fragment comprises a S645C mutation, the numbering referring to SEQ ID No. 1, and
[0026] (b) a second part comprising the Fc portion of human IgG or a variant of the Fc portion of human IgG.

[0027] In one embodiment, the variant of a fragment of human ACE2 consists of a protein having the amino acid sequence according to SEQ ID No. 28 or 29.

[0028] In one embodiment, the variant of a fragment of human ACE2 further comprises a H374N and a H378N mutation, the numbering referring to SEQ ID No. 1. In particular, the variant of the human ACE2 fragment may consist of a protein having the amino acid sequence according to SEQ ID No. 32 or 33.

[0029] In one embodiment, the variant of a fragment of human ACE2 further comprises a mutation at position 273, preferably a R273A mutation, the numbering referring to SEQ ID No. 1. In particular, the variant of the human ACE2 fragment may consist of a protein having the amino acid sequence according to SEQ ID No. 36 or 37.

[0030] In one embodiment, the second part comprises the Fc part of human IgG1 or IgG4 or a variant of the Fc part of human IgG1 or IgG4.

[0031] In one embodiment, the second part comprises the Fc part of human IgG1 according to SEQ ID No. 16, preferably the first part and the second part are linked by the amino acid sequence according to SEQ ID No. 15.

[0032] In another embodiment, the second part comprises the Fc part of human IgG4 according to SEQ ID No. 5, preferably the first part and the second part are linked by the amino acid sequence according to SEQ ID No. 4.

[0033] In another embodiment, the second part comprises a variant of the Fc portion of human IgG4 having the sequence according to SEQ ID No. 44, preferably the first part and the second part are linked by the amino acid sequence according to SEQ ID No. 4.

[0034] In another embodiment, the second part comprises a variant of the Fc portion of human IgG1 having the sequence according to SEQ ID No. 59 or a variant of the Fc portion of human IgG4 having the sequence according to SEQ ID No. 60.

[0035] In one embodiment, the second part comprises a variant of the Fc portion of human IgG1 having the sequence according to SEQ ID No. 59 and the first part and the second part are linked by the amino acid sequence according to SEQ ID No. 15.

[0036] In another embodiment, the second part comprises a variant of the Fc portion of human IgG4 having the sequence according to SEQ ID No. 60 and the first part and the second part are linked by the amino acid sequence according to SEQ ID No. 4.

[0037] The present invention further provides a fusion protein comprising a first part comprising a fragment of human ACE2 or a variant of said fragment, said human ACE2 having the amino acid sequence according to SEQ ID No. 1, and a second part comprising a variant of the Fc portion of human IgG1, said variant having the sequence according to SEQ ID No. 59 or a variant of the Fc portion of human IgG4, said variant having the sequence according to SEQ ID No. 60.

[0038] The second part may comprise a variant of the Fc portion of human IgG1 having the sequence according to SEQ ID No. 59 and the first part and the second part are linked by the amino acid sequence according to SEQ ID No. 15 or the second part may comprise a variant of the Fc portion of human IgG4 having the sequence according to SEQ ID No. 60 and the first part and the second part are linked by the amino acid sequence according to SEQ ID No. 4.

[0039] The fragment of human ACE2 may consist of a protein having the amino acid sequence according to SEQ ID No. 2 or may be the extracellular domain of ACE2 consisting of a protein having the amino acid sequence according to SEQ ID No. 3.

[0040] In one embodiment. the variant of the human ACE2 fragment is an enzymatically inactive variant of human ACE2.

[0041] The enzymatically inactive variant of human ACE2 may comprise a H374N and a H378N mutation, the numbering referring to SEQ ID No. 1 or a mutation at position 273, preferably a R273A mutation, the numbering referring to SEQ ID No. 1.

[0042] The present invention further provides a fusion protein comprising:
[0043] (a) a first part comprising a variant of a fragment of human ACE2, said human ACE2 having the amino acid sequence according to SEQ ID No. 1, wherein the variant of the human ACE2 fragment comprises a R273A mutation, the numbering referring to SEQ ID No. 1, and
[0044] (b) a second part comprising the Fc portion of human IgG or a variant of the Fc portion of human IgG.

[0045] In one embodiment, the variant of a fragment of human ACE2 consists of a protein having the amino acid sequence according to SEQ ID No. 24 or 25.

[0046] The second part may comprise the Fc part of human IgG1 or IgG4.

[0047] In one embodiment, the second part comprises the Fc part of human IgG1 according to SEQ ID No. 16, preferably the first part and the second part are linked by the amino acid sequence according to SEQ ID No. 15.

[0048] In an alternative embodiment, the second part comprises the Fc part of human IgG4 according to SEQ ID No. 5, preferably the first part and the second part are linked by the amino acid sequence according to SEQ ID No. 4.

[0049] In an alternative embodiment, the second part comprises a variant of the Fc portion of human IgG4 having the sequence according to SEQ ID No. 44.

[0050] The fusion protein of the present invention may have an amino acid sequence selected from the group of amino acid sequences according to SEQ ID Nos. 20, 21, 22, 23, 26, 27, 30, 31, 34, 35, 38, 39, 40, 41, 42, 43, 45, 46, 47, 48, 49, 50, 51, 52, 53, 54, 55, 56, 57, 58, 61, 62, 63, 64, 65, 66, 67, 68, 69, 70, 71, 72, 73, 74, 75, 76, 77, 78, 79, 80, 81, 82, 83, 84, 85, 86, 87, 88, 89, 90, 93 and 94.

[0051] The present invention also relates to a nucleic acid molecule comprising a nucleic acid sequence encoding said fusion protein, an expression vector comprising said nucleic acid molecule and a host cell comprising said nucleic acid molecule or said expression vector.

[0052] Further, the present invention relates to a method for producing said fusion protein, comprising culturing said host cell in a suitable culture medium.

[0053] The present invention also relates to said fusion protein for medical use, in particular for use in preventing and/or treating an infection with a coronavirus binding to ACE2.

[0054] In one embodiment, the coronavirus binding to ACE2 is selected from the group consisting of SARS, SARS-CoV-2 and NL-63, preferably is SARS-CoV-2.

[0055] Said fusion protein may be administered in combination with an anti-viral agent which may be selected from the group consisting of remdesivir, arbidol HCl, ritonavir, lopinavir, darunavir, ribavirin, chloroquin and derivatives thereof, nitazoxanide, camostat mesilate, tocilizumab, siltuximab, sarilumab and baricitinib phosphate.

[0056] Said fusion protein may also be administered in combination with an antibody which may be selected from the group consisting of bamlanivimab, etesevimab, casirivimab, imdevimab, sotrovimab and mixtures thereof.

[0057] The present invention also relates to said fusion protein for use in treating hypertension (including high blood pressure), congestive heart failure, chronic heart failure, acute heart failure, contractile heart failure, myocardial infarction, arteriosclerosis, kidney failure, renal failure, Acute Respiratory Distress Syndrome (ARDS), Acute Lung Injury (ALI), chronic obstructive pulmonary disease (COPD), pulmonary hypertension, renal fibrosis, chronic renal failure, acute renal failure, acute kidney injury, inflammatory bowel disease and multi-organ dysfunction syndrome.

[0058] The present invention also relates to a pharmaceutical composition comprising said fusion protein and a pharmaceutically acceptable carrier or excipient. The pharmaceutical composition may further comprise an anti-viral agent.

### BRIEF DESCRIPTION OF THE DRAWINGS

[0059] FIG. 1: Protein yield of different fusion proteins after protein A chromatography as determined by slope spectroscopy

[0060] FIG. 2: Analysis of high molecular weight species of different fusion proteins by analytical size exclusion chromatography

[0061] FIG. 3: Analysis of O-glycosylation of different fusion proteins

[0062] FIG. 4: Inhibition of S1 binding to ACE2 by different fusion proteins as determined by competitive ELISA
[0063] a) Constructs 1-4 having the Fc part of IgG4
[0064] b) Constructs 5-8 having the Fc part of IgG1

[0065] FIG. 5: Neutralization of SARS-CoV-2 (strain Victoria/1/2020) by constructs 1, 3, 5 and 7

[0066] FIG. 6: Analysis of enzymatic activity of constructs 1 to 8 and two reference proteins (Ref1, Ref2)
[0067] a) Mean values of the enzymatic activity with standard deviation from six individual experiments
[0068] b) Single values for each construct obtained in six individual experiments

[0069] FIG. 7: Neutralization of different coronaviruses by constructs 1 to 8
[0070] a) Neutralization of SARS-CoV (strain SARS-CoV-Fra-1 (AY291315.1)); mean IC50 values from three independent experiments; error bars indicate 95% confidence interval
[0071] b) Neutralization of SARS-CoV-2 (SARS-CoV-2-Munich-TUM-1 (EPI_ISL_582134)); mean IC50 values from three independent experiments; error bars indicate 95% confidence interval
[0072] c) Neutralization of SARS-CoV-2 D614G; mean IC50 values from three independent experiments;error bars indicate 95% confidence interval

[0073] FIG. 8: Binding of the fusion protein according to SEQ ID NO. 6 to ACE2 as determined by binding ELISA

[0074] FIG. 9: Neutralization of different virus isolates (A: SARS-CoV-2 Munich-TUM-1; B: SARS-CoV-2 D614G; C: SARS-CoV-2 B.1.1.7; D: SARS-CoV-2 B.1.351) with the fusion proteins according to SEQ ID No. 6 (construct 1, left-hand side) and SEQ ID No. 8 (construct 3, right-hand side). The dotted line depicts the determination of the IC50 value. Data given are means±SEM of three independent experiments each.

[0075] FIG. 10: Analysis of high molecular weight species of different fusion proteins after storage for different periods by analytical size exclusion chromatography
[0076] a) Analysis of constructs 1 to 4 (according to SEQ ID NOs. 6 to 9)
[0077] b) Analysis of constructs 5 to 8 (according to SEQ ID NOs. 10 to 13)

### DETAILED DESCRIPTION OF THE INVENTION

[0078] The present invention as illustratively described in the following may suitably be practiced in the absence of any element or elements, limitation or limitations, not specifically disclosed herein.

[0079] The present invention will be described with respect to particular embodiments, but the invention is not limited thereto, but only by the claims.

[0080] Where the term “comprising” is used in the present description and claims, it does not exclude other elements. For the purposes of the present invention, the term “consisting of” is considered to be a preferred embodiment of the term “comprising”. If hereinafter a group is defined to comprise at least a certain number of embodiments, this is also to be understood to disclose a group which preferably consists only of these embodiments.

[0081] For the purposes of the present invention, the term “obtained” is considered to be a preferred embodiment of the term “obtainable”. If hereinafter e.g. a cell or organism is defined to be obtainable by a specific method, this is also to be understood to disclose a cell or organism which is obtained by this method.

[0082] Where an indefinite or definite article is used when referring to a singular noun, e.g. “a”, “an” or “the”, this includes a plural of that noun unless something else is specifically stated.

[0083] As discussed above, the present invention provides a fusion protein comprising a first part comprising certain variants of fragment of human ACE2 and a second part comprising the Fc portion of a human IgG or IgG1 or a variant of the Fc portion of human IgG or IgG1. The present invention also provides a fusion protein comprising a first part comprising a certain fragment of human ACE2 or a variant of said fragment and a second part comprising a variant of the Fc portion of human IgG1 or human IgG4. It was shown that a fragment of human ACE2 comprising amino acids 18 to 732 provides a higher yield and a lower amount of high molecular weight species than a fragment of human ACE2 comprising amino acids 18 to 740 as well as no non-natural O-glycosylation, as serine 740 is missing. Further, the fragment of human ACE2 comprising amino acids 18 to 732 showed a higher stability after storage than a fragment of human ACE2 comprising amino acids 18 to 740. Nevertheless, a fusion protein with the fragment of human ACE2 comprising amino acids 18 to 732 neutralized different SARS-CoV2 variants with a similar efficiency as a fusion protein with the fragment of human ACE2 comprising amino acids 18 to 740. In contrast, it has been found by others that a fusion protein comprising only amino acids 18 to 615 of ACE2 blocked infection with SARS-CoV2 less efficiently than a fusion protein comprising amino acids 18 to 740 of ACE2 (Li et al. (2020) J. Virol. 94(22): e01283-20). In view of the literature (e.g. Tada et al. (2020), available at https://www.biorxiv.org/content/10.1101/2020.09.16.300319v1.full) it is assumed that a fusion protein with the Fc part of human IgG has a higher affinity to the Spike protein of SARS-CoV-2 than a soluble ACE2 dimer without the Fc portion. It is also assumed that the disulfide bridge between the Fc portions stabilizes the binding of the fusion proteins to their target, such as the Spike protein of SARS-CoV-2. The fusion protein of the present invention binds to FcRn which leads to a longer half-life period than the soluble ACE2 dimer.

[0084] It was shown that Fc-mediated antibody functions such as antibody-dependent cytotoxicity (ADCC) and antibody-dependent phagocytosis (ADP) protect against influenza virus and other viral pathogens (Vanderven and Kent (2020) Immunology & Cell Biology 98: 253-263). In the context of SARS-CoV2 treatment the EMA Assessment Report for the mixture of the antibodies casirivimab and imdevimab discusses that these antibodies are able to mediate ADCC and ADP. Further, no evidence of antibody-dependent enhancement was observed in any treated animal.

[0085] A “fusion protein” is a protein which is formed by at least two polypeptide parts which are not naturally linked with each other. The two polypeptide parts are linked by a peptide bond and optionally a linker molecule is inserted between the two polypeptide parts. The two polypeptide parts are transcribed and translated as a single molecule. The fusion protein typically has functionalities derived from both polypeptide parts. In the context of the present invention, the fusion protein retains the binding properties of ACE2, in particular the binding of viruses such as coronaviruses, and the increased half-life and Fc receptor binding conferred by the Fc portion of human IgG.

[0086] The term “human ACE2” refers to angiotensin converting enzyme 2 derived from a human subject. The full-length sequence of human ACE2 has 805 amino acids. It comprises a signal peptide, an N-terminal extracellular peptidase domain followed by a collectrin-like domain, a single transmembrane helix and a short intracellular segment. The full-length sequence of human ACE2 is depicted in SEQ ID No. 1. Unless indicated otherwise, the amino acid numbering used herein refers to the numbering of the full-length sequence of human ACE2 according to SEQ ID No. 1. The extracellular domain of human ACE2 consists of the amino acids 18 to 740 of SEQ ID No. 1 and is depicted in SEQ ID No. 3.

[0087] The term “fragment of human ACE2” refers to a polypeptide which lacks one or more amino acids compared to the full-length sequence of human ACE2 according to SEQ ID No. 1. The fragment of human ACE2 is capable of binding to the S protein of at least one coronavirus, in particular to the S protein of SARS-CoV-2. The binding of a fragment of human ACE2 to the S protein of at least one coronavirus can be determined in an ELISA assay in which the S protein is immobilized on a substrate and contacted with the fragment of human ACE2 and the interaction between the S protein and the fragment of human ACE2 is detected. Alternatively, the binding of a fragment of human ACE2 to the S protein of at least one coronavirus can be determined by surface plasmon resonance, e.g. as described in Shang et al. (2020) Nature doi: 10.1038/s41586-020-2179-y; Wrapp et al. (2020) Science 367(6483): 1260-1263; Lei et al. (2020) Nature Communications 11(1): 2070. In a further alternative, the binding of a fragment of human ACE2 to the S protein of at least one coronavirus can be determined by biolayer interferometry, e.g. as described in Seydoux et al. (2020) https://doi.org/10.1101/2020.05.12.091298. Suitable methods for determining the binding to the S protein are also described in the examples section herein.

[0088] In one embodiment, the fragment of human ACE2 consists of 360 to 723 contiguous amino acids within the sequence according to SEQ ID No. 1. Preferably, the fragment of human ACE2 consists of 380 to 723, 400 to 723, 420 to 723, 440 to 723, 460 to 723, 480 to 723 or 500 to 723 contiguous amino acids within the sequence according to SEQ ID No. 1. Preferably, the fragment of human ACE2 consists of 520 to 723, 540 to 723, 560 to 723, 580 to 723 or 600 to 723 contiguous amino acids within the sequence according to SEQ ID No. 1. More preferably, the fragment of human ACE2 consists of 620 to 723, 640 to 723, 660 to 723, 680 to 723, 700 to 723 or 720 to 723 contiguous amino acids within the sequence according to SEQ ID No. 1.

[0089] In one embodiment, the fragment of human ACE2 comprises the amino acid residues K31 and K353, the numbering referring to SEQ ID No. 1. In one embodiment, the fragment of human ACE2 comprises the amino acid residues Q24, D30, E35 and Q42, the numbering referring to SEQ ID No. 1. In one embodiment, the fragment of human ACE2 comprises the amino acid residues Q24, D30, K31, E35, Q42 and K353, the numbering referring to SEQ ID No. 1.

[0090] In one embodiment, the fragment of human ACE2 consists of 360 to 723 contiguous amino acids within the sequence according to SEQ ID No. 1 and comprises the amino acid residues K31 and K353, the numbering referring to SEQ ID No. 1. Preferably, the fragment of human ACE2 consists of 380 to 723, 400 to 723, 420 to 723, 440 to 723, 460 to 723, 480 to 723 or 500 to 723 contiguous amino acids within the sequence according to SEQ ID No. 1 and comprises the amino acid residues K31 and K353, the numbering referring to SEQ ID No. 1. Preferably, the fragment of human ACE2 consists of 520 to 723, 540 to 723, 560 to 723, 580 to 723 or 600 to 723 contiguous amino acids within the sequence according to SEQ ID No. 1 and comprises the amino acid residues K31 and K353, the numbering referring to SEQ ID No. 1. More preferably, the fragment of human ACE2 consists of 620 to 723, 640 to 723, 660 to 723, 680 to 723, 700 to 723 or 720 to 723 contiguous amino acids within the sequence according to SEQ ID No. 1 and comprises the amino acid residues K31 and K353, the numbering referring to SEQ ID No. 1.

[0091] In one embodiment, the fragment of human ACE2 consists of 360 to 723 contiguous amino acids within the sequence according to SEQ ID No. 1 and comprises the amino acid residues Q24, D30, E35 and Q42, the numbering referring to SEQ ID No. 1. Preferably, the fragment of human ACE2 consists of 380 to 723, 400 to 723, 420 to 723, 440 to 723, 460 to 723, 480 to 723 or 500 to 723 contiguous amino acids within the sequence according to SEQ ID No. 1 and comprises the amino acid residues Q24, D30, E35 and Q42, the numbering referring to SEQ ID No. 1. Preferably, the fragment of human ACE2 consists of 520 to 723, 540 to 723, 560 to 723, 580 to 723 or 600 to 723 contiguous amino acids within the sequence according to SEQ ID No. 1 and comprises the amino acid residues Q24, D30, E35 and Q42, the numbering referring to SEQ ID No. 1. More preferably, the fragment of human ACE2 consists of 620 to 723, 640 to 723, 660 to 723, 680 to 723, 700 to 723 or 720 to 723 contiguous amino acids within the sequence according to SEQ ID No. 1 and comprises the amino acid residues Q24, D30, E35 and Q42, the numbering referring to SEQ ID No. 1.

[0092] In one embodiment, the fragment of human ACE2 consists of 360 to 723 contiguous amino acids within the sequence according to SEQ ID No. 1 and comprises the amino acid residues Q24, D30, K31, E35, Q42 and K353, the numbering referring to SEQ ID No. 1. Preferably, the fragment of human ACE2 consists of 380 to 723, 400 to 723, 420 to 723, 440 to 723, 460 to 723, 480 to 723 or 500 to 723 contiguous amino acids within the sequence according to SEQ ID No. 1 and comprises the amino acid residues Q24, D30, K31, E35, Q42 and K353, the numbering referring to SEQ ID No. 1. Preferably, the fragment of human ACE2 consists of 520 to 723, 540 to 723, 560 to 723, 580 to 723 or 600 to 723 contiguous amino acids within the sequence according to SEQ ID No. 1 and comprises the amino acid residues Q24, D30, K31, E35, Q42 and K353, the numbering referring to SEQ ID No. 1. More preferably, the fragment of human ACE2 consists of 620 to 723, 640 to 723, 660 to 723, 680 to 723, 700 to 723 or 720 to 723 contiguous amino acids within the sequence according to SEQ ID No. 1 and comprises the amino acid residues Q24, D30, K31, E35, Q42 and K353, the numbering referring to SEQ ID No. 1.

[0093] In one embodiment, the fragment of human ACE2 consists of amino acids 18 to 380, 18 to 400, 18 to 420, 18 to 440, 18 to 460, 18 to 480 or 18 to 500 of the sequence according to SEQ ID No. 1. Preferably, the fragment of human ACE2 consists of amino acids 18 to 520, 18 to 540, 18 to 560, 18 to 580 or 18 to 600 of the sequence according to SEQ ID No. 1. More preferably, the fragment of human ACE2 consists of amino acids 18 to 605, 18 to 615, 18 to 620, 18 to 640, 18 to 660, 18 to 680 or 18 to 700 of the sequence according to SEQ ID No. 1. Even more preferably, the fragment of human ACE2 consists of amino acids 18 to 710, 18 to 720 or 18 to 730 of the sequence according to SEQ ID No. 1.

[0094] In one embodiment, the fragment of human ACE2 consists of the amino acid sequence according to SEQ ID No. 2. The amino acid sequence according to SEQ ID No. 2 starts at amino acid Q18 and ends with amino acid G732 in the sequence according to SEQ ID No. 1. The amino acid glycine at the C-terminal end of this fragment provides a high rotational freedom which favours the fusion of the two protein parts and increases the stability of the fusion protein. Additionally, it has surprisingly been found that the use of an ACE2 fragment comprising the amino acid sequence which starts at amino acid Q18 and ends with amino acid G732 in the sequence according to SEQ ID No. 1 provides a better yield as well as a better stability than a longer ACE2 fragment. Moreover, it lacks a non-natural O glycosylation and neutralizes different SARS-CoV2 variants with similar efficiency as the longer ACE2 fragment. This is in contrast to findings with a shorter ACE2 fragment comprising only amino acids 18 to 615 of ACE2 which inhibited infection with SARS-CoV2 less efficiently as the longer ACE2 fragment comprising amino acids 18 to 740 of ACE2.

[0095] In one embodiment, the fragment of human ACE2 consists of the complete extracellular domain of human ACE2 which has the amino acid sequence according to SEQ ID No. 3.

[0096] In one embodiment, the fragment of human ACE2 consists of the amino acid sequence according to SEQ ID No. 14. The amino acid sequence according to SEQ ID No. 14 starts at amino acid Q18 and ends with amino acid G605 in the sequence according to SEQ ID No. 1.

[0097] In one embodiment, the fragment of human ACE2 is N-glycosylated at at least one amino acid residue selected from N53, N90, N103, N322, N432, N546 and N690, the numbering referring to SEQ ID No. 1. In one embodiment, the fragment of human ACE2 is N-glycosylated at amino acid residues N53, N90 and, N322, the numbering referring to SEQ ID No. 1. In one embodiment, the fragment of human ACE2 is N-glycosylated at amino acid residues N53, N90, N103, N322, N432, N546 and N690, the numbering referring to SEQ ID No. 1.

[0098] In one embodiment, the fragment of human ACE2 consists of the amino acid sequence according to SEQ ID No. 2 and is N-glycosylated at at least one amino acid residue selected from N53, N90, N103, N322, N432, N546 and N690, the numbering referring to SEQ ID No. 1. In one embodiment, the fragment of human ACE2 consists of the amino acid sequence according to SEQ ID No. 2 and is N-glycosylated at amino acid residues N53, N90 and N322, the numbering referring to SEQ ID No. 1. In one embodiment, the fragment of human ACE2 consists of the amino acid sequence according to SEQ ID No. 2 and is N-glycosylated at amino acid residues N53, N90, N103, N322, N432, N546 and N690, the numbering referring to SEQ ID No. 1.

[0099] In one embodiment, the fragment of human ACE2 consists of the amino acid sequence according to SEQ ID No. 3 and is N-glycosylated at at least one amino acid residue selected from N53, N90, N103, N322, N432, N546 and N690, the numbering referring to SEQ ID No. 1. In one embodiment, the fragment of human ACE2 consists of the amino acid sequence according to SEQ ID No. 3 and is N-glycosylated at amino acid residues N53, N90 and N322, the numbering referring to SEQ ID No. 1. In one embodiment, the fragment of human ACE2 consists of the amino acid sequence according to SEQ ID No. 3 and is N-glycosylated at amino acid residues N53, N90, N103, N322, N432, N546 and N690, the numbering referring to SEQ ID No. 1.

[0100] In the context of the present invention, the term “fragment of human ACE2 consists of/consisting of a protein having the amino acid sequence according to SEQ ID No. 2 is intended to mean that the fragment has exactly the length as defined by the corresponding sequence in the sequence listing and does not comprise any amino acid additions and/or deletions. However, this term does not exclude the presence of amino acid substitution(s) within the sequence of the defined fragment.

[0101] In one embodiment, the fragment of human ACE2 comprises or is identified by 360 to 723 contiguous amino acids within the sequence according to SEQ ID No. 1. Preferably, the fragment of human ACE2 comprises or is identified by 380 to 723, 400 to 723, 420 to 723, 440 to 723, 460 to 723, 480 to 723 or 500 to 723 contiguous amino acids within the sequence according to SEQ ID No. 1. Preferably, the fragment of human ACE2 comprises or is identified by 520 to 723, 540 to 723, 560 to 723, 580 to 723 or 600 to 723 contiguous amino acids within the sequence according to SEQ ID No. 1. More preferably, the fragment of human ACE2 comprises or is identified by 620 to 723, 640 to 723, 660 to 723, 680 to 723, 700 to 723 or 720 to 723 contiguous amino acids within the sequence according to SEQ ID No. 1.

[0102] In one embodiment, the fragment of human ACE2 comprises the amino acid residues K31 and K353, the numbering referring to SEQ ID No. 1. In one embodiment, the fragment of human ACE2 comprises the amino acid residues Q24, D30, E35 and Q42, the numbering referring to SEQ ID No. 1. In one embodiment, the fragment of human ACE2 comprises the amino acid residues Q24, D30, K31, E35, Q42 and K353, the numbering referring to SEQ ID No. 1.

[0103] In one embodiment, the fragment of human ACE2 comprises or is identified by 360 to 723 contiguous amino acids within the sequence according to SEQ ID No. 1 and comprises the amino acid residues K31 and K353, the numbering referring to SEQ ID No. 1. Preferably, the fragment of human ACE2 comprises or is identified by 380 to 723, 400 to 723, 420 to 723, 440 to 723, 460 to 723, 480 to 723 or 500 to 723 contiguous amino acids within the sequence according to SEQ ID No. 1 and comprises the amino acid residues K31 and K353, the numbering referring to SEQ ID No. 1. Preferably, the fragment of human ACE2 comprises or is identified by 520 to 723, 540 to 723, 560 to 723, 580 to 723 or 600 to 723 contiguous amino acids within the sequence according to SEQ ID No. 1 and comprises the amino acid residues K31 and K353, the numbering referring to SEQ ID No. 1. More preferably, the fragment of human ACE2 comprises or is identified by 620 to 723, 640 to 723, 660 to 723, 680 to 723, 700 to 723 or 720 to 723 contiguous amino acids within the sequence according to SEQ ID No. 1 and comprises the amino acid residues K31 and K353, the numbering referring to SEQ ID No. 1.

[0104] In one embodiment, the fragment of human ACE2 comprises or is identified by 360 to 723 contiguous amino acids within the sequence according to SEQ ID No. 1 and comprises the amino acid residues Q24, D30, E35 and Q42, the numbering referring to SEQ ID No. 1. Preferably, the fragment of human ACE2 comprises or is identified by 380 to 723, 400 to 723, 420 to 723, 440 to 723, 460 to 723, 480 to 723 or 500 to 723 contiguous amino acids within the sequence according to SEQ ID No. 1 and comprises the amino acid residues Q24, D30, E35 and Q42, the numbering referring to SEQ ID No. 1. Preferably, the fragment of human ACE2 comprises or is identified by 520 to 723, 540 to 723, 560 to 723, 580 to 723 or 600 to 723 contiguous amino acids within the sequence according to SEQ ID No. 1 and comprises the amino acid residues Q24, D30, E35 and Q42, the numbering referring to SEQ ID No. 1. More preferably, the fragment of human ACE2 comprises or is identified by 620 to 723, 640 to 723, 660 to 723, 680 to 723, 700 to 723 or 720 to 723 contiguous amino acids within the sequence according to SEQ ID No. 1 and comprises the amino acid residues Q24, D30, E35 and Q42, the numbering referring to SEQ ID No. 1.

[0105] In one embodiment, the fragment of human ACE2 comprises or is identified by 360 to 723 contiguous amino acids within the sequence according to SEQ ID No. 1 and comprises the amino acid residues Q24, D30, K31, E35, Q42 and K353, the numbering referring to SEQ ID No. 1. Preferably, the fragment of human ACE2 comprises or is identified by 380 to 723, 400 to 723, 420 to 723, 440 to 723, 460 to 723, 480 to 723 or 500 to 723 contiguous amino acids within the sequence according to SEQ ID No. 1 and comprises the amino acid residues Q24, D30, K31, E35, Q42 and K353, the numbering referring to SEQ ID No. 1. Preferably, the fragment of human ACE2 comprises or is identified by 520 to 723, 540 to 723, 560 to 723, 580 to 723 or 600 to 723 contiguous amino acids within the sequence according to SEQ ID No. 1 and comprises the amino acid residues Q24, D30, K31, E35, Q42 and K353, the numbering referring to SEQ ID No. 1. More preferably, the fragment of human ACE2 comprises or is identified by 620 to 723, 640 to 723, 660 to 723, 680 to 723, 700 to 723 or 720 to 723 contiguous amino acids within the sequence according to SEQ ID No. 1 and comprises the amino acid residues Q24, D30, K31, E35, Q42 and K353, the numbering referring to SEQ ID No. 1.

[0106] In one embodiment, the fragment of human ACE2 comprises or is identified by amino acids 18 to 380, 18 to 400, 18 to 420, 18 to 440, 18 to 460, 18 to 480 or 18 to 500 of the sequence according to SEQ ID No. 1. Preferably, the fragment of human ACE2 comprises or is identified by amino acids 18 to 520, 18 to 540, 18 to 560, 18 to 580 or 18 to 600 of the sequence according to SEQ ID No. 1. More preferably, the fragment of human ACE2 comprises or is identified by amino acids 18 to 605, 18 to 615, 18 to 620, 18 to 640, 18 to 660, 18 to 680 or 18 to 700 of the sequence according to SEQ ID No. 1. Even more preferably, the fragment of human ACE2 comprises or is identified by amino acids 18 to 710, 18 to 720 or 18 to 730 of the sequence according to SEQ ID No. 1.

[0107] In one embodiment, the fragment of human ACE2 comprises or is identified by the amino acid sequence according to SEQ ID No. 2. The amino acid sequence according to SEQ ID No. 2 starts at amino acid Q18 and ends with amino acid G732 in the sequence according to SEQ ID No. 1. The amino acid glycine at the C-terminal end of this fragment provides a high rotational freedom which favours the fusion of the two protein parts and increases the stability of the fusion protein. Additionally, the use of an ACE2 fragment comprising or which is identified by the amino acid sequence which starts at amino acid Q18 and ends with amino acid G732 in the sequence according to SEQ ID No. 1 provides a better yield than a longer ACE2 fragment.

[0108] In one embodiment, the fragment of human ACE2 comprises or is identified by the complete extracellular domain of human ACE2 which has the amino acid sequence according to SEQ ID No. 3.

[0109] In one embodiment, the fragment of human ACE2 comprises or is identified by the amino acid sequence according to SEQ ID No. 14. The amino acid sequence according to SEQ ID No. 14 starts at amino acid Q18 and ends with amino acid G605 in the sequence according to SEQ ID No. 1.

[0110] In one embodiment, the fragment of human ACE2 is N-glycosylated at at least one amino acid residue selected from N53, N90, N103, N322, N432, N546 and N690, the numbering referring to SEQ ID No. 1. In one embodiment, the fragment of human ACE2 is N-glycosylated at amino acid residues N53, N90 and, N322, the numbering referring to SEQ ID No. 1. In one embodiment, the fragment of human ACE2 is N-glycosylated at amino acid residues N53, N90, N103, N322, N432, N546 and N690, the numbering referring to SEQ ID No. 1.

[0111] In one embodiment, the fragment of human ACE2 comprises or is identified by the amino acid sequence according to SEQ ID No. 2 and is N-glycosylated at at least one amino acid residue selected from N53, N90, N103, N322, N432, N546 and N690, the numbering referring to SEQ ID No. 1. In one embodiment, the fragment of human ACE2 comprises or is identified by of the amino acid sequence according to SEQ ID No. 2 and is N-glycosylated at amino acid residues N53, N90 and N322, the numbering referring to SEQ ID No. 1. In one embodiment, the fragment of human ACE2 comprises or is identified by the amino acid sequence according to SEQ ID No. 2 and is N-glycosylated at amino acid residues N53, N90, N103, N322, N432, N546 and N690, the numbering referring to SEQ ID No. 1.

[0112] In one embodiment, the fragment of human ACE2 comprises or is identified by the amino acid sequence according to SEQ ID No. 3 and is N-glycosylated at at least one amino acid residue selected from N53, N90, N103, N322, N432, N546 and N690, the numbering referring to SEQ ID No. 1. In one embodiment, the fragment of human ACE2 comprises or is identified by the amino acid sequence according to SEQ ID No. 3 and is N-glycosylated at amino acid residues N53, N90 and N322, the numbering referring to SEQ ID No. 1. In one embodiment, the fragment of human ACE2 comprises or is identified by the amino acid sequence according to SEQ ID No. 3 and is N-glycosylated at amino acid residues N53, N90, N103, N322, N432, N546 and N690, the numbering referring to SEQ ID No. 1.

[0113] The term “N-glycosylated” or “N-glycosylation” means that a glycan structure is attached to the amide nitrogen of an asparagine residue of a protein. A glycan is a branched, flexible chain of carbohydrates and the exact structure of the glycan attached to the asparagine residue of a protein depends on the expression system used for glycoprotein production.

[0114] A “variant” of the fragment of human ACE2 refers to a fragment as defined above, wherein compared to the corresponding sequence in the amino acid sequence of wild-type, full-length human ACE2 according to SEQ ID No. 1 at least one amino acid residue is different or at least two, at least three, at least four, at least five, at least six, at least seven, at least eight, at least nine, at least ten, at least eleven or at least thirteen amino acids are different. The “variant” of the fragment of human ACE2 comprises one or more amino acid substitutions in the sequence of the fragment of human ACE2. A “variant” of the fragment of human ACE2 does not comprise any amino acid additions or deletions compared to the sequence from which the variant is derived. In one embodiment, the variant the fragment of human ACE2 is a variant of the fragment of human ACE2 according to SEQ ID No. 2 or 3 and does not comprise any amino acid additions or deletions compared to the sequence according to SEQ ID No. 2 or 3, i.e. it has the same length as the sequence according to SEQ ID No. 2 or 3. Within the scope of the present invention a variant of the fragment of human ACE2 is capable of binding to the S protein of at least one coronavirus, in particular to the S protein of SARS-CoV-2. The binding of a variant of the fragment of human ACE2 to the S protein of at least one coronavirus, in particular to the S protein of SARS-CoV-2, can be determined as described above for fragments of human ACE2.

[0115] In one embodiment, the variant of the fragment of human ACE2 differs from the corresponding amino acid sequence in the sequence according to SEQ ID No. 1 by one amino acid. In another embodiment, the variant of the fragment of human ACE2 differs from the corresponding amino acid sequence in the sequence according to SEQ ID No. 1 by two amino acids. In still another embodiment, the variant of the fragment of human ACE2 differs from the corresponding amino acid sequence in the sequence according to SEQ ID No. 1 by three amino acids. In still another embodiment, the variant of the fragment of human ACE2 differs from the corresponding amino acid sequence in the sequence according to SEQ ID No. 1 by four amino acids. In still another embodiment, the variant of the fragment of human ACE2 differs from the corresponding amino acid sequence in the sequence according to SEQ ID No. 1 by five amino acids. In still another embodiment, the variant of the fragment of human ACE2 differs from the corresponding amino acid sequence in the sequence according to SEQ ID No. 1 by six amino acids. In still another embodiment, the variant of the fragment of human ACE2 differs from the corresponding amino acid sequence in the sequence according to SEQ ID No. 1 by seven amino acids. In still another embodiment, the variant of the fragment of human ACE2 differs from the corresponding amino acid sequence in the sequence according to SEQ ID No. 1 by eight amino acids. In still another embodiment, the variant of the fragment of human ACE2 differs from the corresponding amino acid sequence in the sequence according to SEQ ID No. 1 by nine amino acids. In still another embodiment, the variant of the fragment of human ACE2 differs from the corresponding amino acid sequence in the sequence according to SEQ ID No. 1 by ten amino acids. In still another embodiment, the variant of the fragment of human ACE2 differs from the corresponding amino acid sequence in the sequence according to SEQ ID No. 1 by eleven amino acids. In still another embodiment, the variant of the fragment of human ACE2 differs from the corresponding amino acid sequence in the sequence according to SEQ ID No. 1 by twelve amino acids. In still another embodiment, the variant of the fragment of human ACE2 differs from the corresponding amino acid sequence in the sequence according to SEQ ID No. 1 by thirteen amino acids.

[0116] One variant of the fragment of human ACE2 may be an enzymatically inactive variant. “The enzymatically inactive variant of the fragment of human ACE2” lacks the ability to cleave angiotensin II to Ang1-7. The enzymatic activity of human ACE2 can be determined by methods known to the skilled person. Suitable kits for determining the enzymatic activity of human ACE2 are commercially available, for example from the companies BioVision or Anaspec. By using an enzymatically inactive ACE2 variant any side effects associated with the enzymatic activity of ACE2 such as effects on the cardiovascular system or the regulation of blood pressure are eliminated. Further, the risk of counterbalancing the RAS-MAS equilibrium is reduced.

[0117] The enzymatically inactive variant of the fragment of human ACE2 may comprise one or more mutations of amino acids within the catalytic centre of ACE2. In particular, the enzymatically inactive variant of the fragment of human ACE2 comprises a mutation of the wildtype histidine at residue 374 of the sequence according to SEQ ID No. 1 and/or a mutation of the wildtype histidine at residue 378 of the sequence according to SEQ ID No. 1. The wild-type histidine may be mutated to any amino acid other than histidine and particularly, the wild-type histidine is mutated to asparagine. Preferably, the enzymatically inactive variant of the fragment of human ACE2 comprises a H374N and a H378N mutation, the numbering referring to the sequence according to SEQ ID No. 1.

[0118] In another embodiment, the enzymatically inactive variant of the fragment of human ACE2 comprises a mutation at one or more of the following amino acid residues, the numbering referring to the sequence according to SEQ ID No. 1: residue 345 (histidine in wild-type), 273 (arginine in wild-type), 402 (glutamic acid in wild-type) and 505 (histidine in wild-type). In one embodiment, the enzymatically inactive variant of the fragment of human ACE2 comprises a mutation of histidine at residue 345 to alanine or leucine, a mutation of arginine at residue 273 to alanine, glutamine or lysine, a mutation of glutamic acid at residue 402 to alanine and/or a mutation of histidine at residue 505 to alanine or leucine, the numbering referring to the sequence according to SEQ ID No. 1. In a particular embodiment, the enzymatically inactive variant of the fragment of human ACE2 comprises a mutation of arginine at residue 273 to alanine (also called R273A mutation). It was found that arginine 273 is critical for substrate binding and that its substitution abolishes enzymatic activity (Guy et al. (2005) FEBS J. 272(14): 3512-3520).

[0119] In one embodiment, the fragment of human ACE2 consists of amino acids 18 to 380, 18 to 400, 18 to 420, 18 to 440, 18 to 460, 18 to 480 or 18 to 500 of the sequence according to SEQ ID No. 1 and comprises a H374N and a H378N mutation, the numbering referring to the sequence according to SEQ ID No. 1. Preferably, the fragment of human ACE2 consists of amino acids 18 to 520, 18 to 540, 18 to 560, 18 to 580 or 18 to 600 of the sequence according to SEQ ID No. 1 and comprises a H374N and a H378N mutation, the numbering referring to the sequence according to SEQ ID No. 1. More preferably, the fragment of human ACE2 consists of amino acids 18 to 615, 18 to 620, 18 to 640, 18 to 660, 18 to 680 or 18 to 700 of the sequence according to SEQ ID No. 1 and comprises a H374N and a H378N mutation, the numbering referring to the sequence according to SEQ ID No. 1. Even more preferably, the fragment of human ACE2 consists of amino acids 18 to 710, 18 to 720 or 18 to 730 of the sequence according to SEQ ID No. 1 and comprises a H374N and a H378N mutation, the numbering referring to the sequence according to SEQ ID No. 1.

[0120] In one embodiment, the fragment of human ACE2 consists of the sequence according to SEQ ID No. 2 and comprises a H374N and a H378N mutation. In one embodiment, the variant of the fragment of human ACE2 consists of a protein having the amino acid sequence according to SEQ ID No. 91.

[0121] In one embodiment, the fragment of human ACE2 consists of the sequence according to SEQ ID No. 3 and comprises a H374N and a H378N mutation. In one embodiment, the variant of the fragment of human ACE2 consists of a protein having the amino acid sequence according to SEQ ID No. 92.

[0122] In one embodiment, the fragment of human ACE2 comprises or is identified by amino acids 18 to 380, 18 to 400, 18 to 420, 18 to 440, 18 to 460, 18 to 480 or 18 to 500 of the sequence according to SEQ ID No. 1 and comprises a H374N and a H378N mutation, the numbering referring to the sequence according to SEQ ID No. 1. Preferably, the fragment of human ACE2 comprises or is identified by amino acids 18 to 520, 18 to 540, 18 to 560, 18 to 580 or 18 to 600 of the sequence according to SEQ ID No. 1 and comprises a H374N and a H378N mutation, the numbering referring to the sequence according to SEQ ID No. 1. More preferably, the fragment of human ACE2 comprises or is identified by amino acids 18 to 615, 18 to 620, 18 to 640, 18 to 660, 18 to 680 or 18 to 700 of the sequence according to SEQ ID No. 1 and comprises a H374N and a H378N mutation, the numbering referring to the sequence according to SEQ ID No. 1. Even more preferably, the fragment of human ACE2 comprises or is identified by amino acids 18 to 710, 18 to 720 or 18 to 730 of the sequence according to SEQ ID No. 1 and comprises a H374N and a H378N mutation, the numbering referring to the sequence according to SEQ ID No. 1.

[0123] In one embodiment, the fragment of human ACE2 comprises or is identified by the sequence according to SEQ ID No. 2 and comprises a H374N and a H378N mutation. In one embodiment, the fragment of human ACE2 comprises or is identified by the sequence according to SEQ ID No. 3 and comprises a H374N and a H378N mutation.

[0124] In one embodiment, the fragment of human ACE2 consists of amino acids 18 to 380, 18 to 400, 18 to 420, 18 to 440, 18 to 460, 18 to 480 or 18 to 500 of the sequence according to SEQ ID No. 1 and comprises a R273A mutation, the numbering referring to the sequence according to SEQ ID No. 1. Preferably, the fragment of human ACE2 consists of amino acids 18 to 520, 18 to 540, 18 to 560, 18 to 580 or 18 to 600 of the sequence according to SEQ ID No. 1 and comprises a R273A mutation, the numbering referring to the sequence according to SEQ ID No. 1. More preferably, the fragment of human ACE2 consists of amino acids 18 to 615, 18 to 620, 18 to 640, 18 to 660, 18 to 680 or 18 to 700 of the sequence according to SEQ ID No. 1 and comprises a R273A mutation, the numbering referring to the sequence according to SEQ ID No. 1. Even more preferably, the fragment of human ACE2 consists of amino acids 18 to 710, 18 to 720 or 18 to 730 of the sequence according to SEQ ID No. 1 and comprises a R273A mutation, the numbering referring to the sequence according to SEQ ID No. 1.

[0125] In one embodiment, the fragment of human ACE2 consists of a protein having the amino acid sequence according to SEQ ID No. 2 and comprises a R273A mutation. In one embodiment, the fragment of human ACE2 consists of a protein having the amino acid sequence according to SEQ ID No. 3 and comprises a R273A mutation. In one embodiment, the variant of the fragment of human ACE2 consists of a protein having the amino acid sequence according to SEQ ID No. 24. In one embodiment, the variant of the fragment of human ACE2 consists of a protein having the amino acid sequence according to SEQ ID No. 25.

[0126] In one embodiment, the fragment of human ACE2 comprises or is identified by amino acids 18 to 380, 18 to 400, 18 to 420, 18 to 440, 18 to 460, 18 to 480 or 18 to 500 of the sequence according to SEQ ID No. 1 and comprises a R273A mutation, the numbering referring to the sequence according to SEQ ID No. 1. Preferably, the fragment of human ACE2 comprises or is identified by amino acids 18 to 520, 18 to 540, 18 to 560, 18 to 580 or 18 to 600 of the sequence according to SEQ ID No. 1 and comprises a R273A mutation, the numbering referring to the sequence according to SEQ ID No. 1. More preferably, the fragment of human ACE2 comprises or is identified by amino acids 18 to 615, 18 to 620, 18 to 640, 18 to 660, 18 to 680 or 18 to 700 of the sequence according to SEQ ID No. 1 and comprises a R273A mutation, the numbering referring to the sequence according to SEQ ID No. 1. Even more preferably, the fragment of human ACE2 comprises or is identified by amino acids 18 to 710, 18 to 720 or 18 to 730 of the sequence according to SEQ ID No. 1 and comprises a R273A mutation, the numbering referring to the sequence according to SEQ ID No. 1.

[0127] In one embodiment, the fragment of human ACE2 comprises or is identified by the sequence according to SEQ ID No. 2 and comprises a R273A mutation. In one embodiment, the fragment of human ACE2 comprises or is identified by the sequence according to SEQ ID No. 3 and comprises a R273A mutation. In one embodiment, the variant of the fragment of human ACE2 comprises or is identified by the sequence according to SEQ ID No. 24 or 25.

[0128] Another variant of the fragment of human ACE2 may be a variant which inhibits shedding of ACE2. It was shown that ACE2 is shed from human airway epithelia by cleavage of the ACE2 ectodomain and that ADAM17 regulates ACE2 cleavage. Further, a point mutation at leucine 584 of full-length ACE2 which is located in the ectodomain of ACE2 abolished shedding (Jia et al. (2009) Am. J. Physiol. Lung Cell. Mol. Physiol. 297(1): L84-96). Hence, in one embodiment the variant of the fragment of human ACE2 comprises a mutation at leucine 584, the numbering referring to the sequence according to SEQ ID No. 1. In one embodiment the mutation at leucine 584 is a L584A mutation.

[0129] In one embodiment, the fragment of human ACE2 consists of the sequence according to SEQ ID No. 2 and comprises a L584A mutation, the numbering referring to the sequence according to SEQ ID No. 1.

[0130] In one embodiment, the fragment of human ACE2 consists of the sequence according to SEQ ID No. 3 and comprises a L584A mutation, the numbering referring to the sequence according to SEQ ID No. 1.

[0131] In one embodiment, the fragment of human ACE2 comprises or is identified by the sequence according to SEQ ID No. 2 and comprises a L584A mutation, the numbering referring to the sequence according to SEQ ID No. 1.

[0132] In one embodiment, the fragment of human ACE2 comprises or is identified by the sequence according to SEQ ID No. 3 and comprises a L584A mutation, the numbering referring to the sequence according to SEQ ID No. 1.

[0133] In one embodiment, the variant of the fragment of human ACE2 comprises a H374N mutation, a H378N mutation and a L584A mutation, the numbering referring to the sequence according to SEQ ID No. 1.

[0134] In one embodiment, the fragment of human ACE2 consists of the sequence according to SEQ ID No. 2 and comprises a H374N mutation, a H378N mutation and a L584A mutation, the numbering referring to the sequence according to SEQ ID No. 1.

[0135] In one embodiment, the fragment of human ACE2 consists of the sequence according to SEQ ID No. 3 and comprises a H374N mutation, a H378N mutation and a L584A mutation, the numbering referring to the sequence according to SEQ ID No. 1.

[0136] In one embodiment, the fragment of human ACE2 comprises or is identified by the sequence according to SEQ ID No. 2 and comprises a H374N mutation, a H378N mutation and a L584A mutation, the numbering referring to the sequence according to SEQ ID No. 1.

[0137] In one embodiment, the fragment of human ACE2 comprises or is identified by the sequence according to SEQ ID No. 3 and comprises a H374N mutation, a H378N mutation and a L584A mutation, the numbering referring to the sequence according to SEQ ID No. 1.

[0138] In one embodiment, the variant of the fragment of human ACE2 comprises a R273A mutation and a L584A mutation, the numbering referring to the sequence according to SEQ ID No. 1.

[0139] In one embodiment, the fragment of human ACE2 consists of the protein having the amino acid sequence according to SEQ ID No. 2 and comprises a R273A mutation and a L584A mutation, the numbering referring to the sequence according to SEQ ID No. 1.

[0140] In one embodiment, the fragment of human ACE2 consists of the protein having the amino acid sequence according to SEQ ID No. 3 and comprises a R273A mutation and a L584A mutation, the numbering referring to the sequence according to SEQ ID No. 1.

[0141] In one embodiment, the fragment of human ACE2 comprises or is identified by the sequence according to SEQ ID No. 2 and comprises a R273A mutation and a L584A mutation, the numbering referring to the sequence according to SEQ ID No. 1.

[0142] In one embodiment, the fragment of human ACE2 comprises or is identified by the sequence according to SEQ ID No. 3 and comprises a R273A mutation and a L584A mutation, the numbering referring to the sequence according to SEQ ID No. 1.

[0143] Another variant of the fragment of human ACE2 may be a variant which inhibits cleavage of ACE2 by the protease TMPRSS2. It was shown that ACE2 proteolysis by TMPRSS2 augments entry of SARS-CoV (Heurich et al. (2014) J. Virol. 88(2): 1293-1307). TMPRSS2 also plays a role in the entry of SARS-CoV-2 into the cells (Hoffmann et al. (2020) Cell 181: 1-10). To abolish cleavage of ACE2 by TMPRSS2, the amino acid residues essential for the cleavage may be mutated. It was shown that arginine and lysine residues within the amino acid region spanning amino acids 697 to 716 of ACE2 are essential for ACE2 cleavage by TMPRSS2 (Heurich et al. (2014) J. Virol. 88(2): 1293-1307). Hence, in one embodiment the variant of the fragment of human ACE2 comprises a mutation at at least one residue selected from amino acids 697, 702, 705, 708, 710 and 716, the numbering referring to SEQ ID No. 1. Preferably, the variant of the fragment of human ACE2 comprises a mutation at at least two or three residues selected from amino acids 697, 702, 705, 708, 710 and 716, the numbering referring to SEQ ID No. 1. More preferably, the variant of the fragment of human ACE2 comprises a mutation at at least four or five residues selected from amino acids 697, 702, 705, 708, 710 and 716, the numbering referring to SEQ ID No. 1. Most preferably, the variant of the fragment of human ACE2 comprises a mutation at residues 697, 702, 705, 708, 710 and 716, the numbering referring to SEQ ID No. 1. The wild-type amino acid residue at any of these residues may be mutated to any other amino acid and particularly, the wild-type amino acid residue is mutated to alanine.

[0144] In one embodiment, the variant of the fragment of human ACE2 comprises at least one of the following mutations: R697A, K702A, R705A, R708A, R710A and R716A, the numbering referring to SEQ ID No. 1. Preferably, the variant of the fragment of human ACE2 comprises at least two or three of the following mutations: R697A, K702A, R705A, R708A, R710A and R716A, the numbering referring to SEQ ID No. 1. More preferably, the variant of the fragment of human ACE2 comprises at least four or five of the following mutations: R697A, K702A, R705A, R708A, R710A and R716A, the numbering referring to SEQ ID No. 1. Most preferably, the variant of the fragment of human ACE2 comprises the following mutations: R697A, K702A, R705A, R708A, R710A and R716A, the numbering referring to SEQ ID No. 1.

[0145] The variant of the fragment of human ACE2 may further comprise mutations at residues 619, 621 and/or 625, the numbering referring to SEQ ID No. 1. In particular, the variant of the fragment of human ACE2 may further comprise the following mutations: K619A, R621A and/or K625A, the numbering referring to SEQ ID No. 1.

[0146] Hence, in one embodiment, the variant of the fragment of human ACE2 comprises the following mutations: K619A, R621A, K625A, R697A, K702A, R705A, R708A, R710A and R716A, the numbering referring to SEQ ID No. 1.

[0147] In one embodiment, the fragment of human ACE2 consists of the sequence according to SEQ ID No. 2 and comprises a mutation at at least one residue selected from amino acids 697, 702, 705, 708, 710 and 716, the numbering referring to SEQ ID No. 1. In one embodiment, the fragment of human ACE2 consists of the sequence according to SEQ ID No. 2 and comprises a mutation at residues 697, 702, 705, 708, 710 and 716, the numbering referring to SEQ ID No. 1. In one embodiment, the fragment of human ACE2 consists of the sequence according to SEQ ID No. 2 and comprises at least one of the following mutations: R697A, K702A, R705A, R708A, R710A and R716A, the numbering referring to SEQ ID No. 1. In one embodiment, the fragment of human ACE2 consists of the sequence according to SEQ ID No. 2 and comprises the following mutations: R697A, K702A, R705A, R708A, R710A and R716A, the numbering referring to SEQ ID No. 1.

[0148] In one embodiment, the fragment of human ACE2 consists of the sequence according to SEQ ID No. 3 and comprises a mutation at at least one residue selected from amino acids 697, 702, 705, 708, 710 and 716, the numbering referring to SEQ ID No. 1. In one embodiment, the fragment of human ACE2 consists of the sequence according to SEQ ID No. 3 and comprises a mutation at residues 697, 702, 705, 708, 710 and 716, the numbering referring to SEQ ID No. 1. In one embodiment, the fragment of human ACE2 consists of the sequence according to SEQ ID No. 3 and comprises at least one of the following mutations: R697A, K702A, R705A, R708A, R710A and R716A, the numbering referring to SEQ ID No. 1. In one embodiment, the fragment of human ACE2 consists of the sequence according to SEQ ID No. 3 and comprises the following mutations: R697A, K702A, R705A, R708A, R710A and R716A, the numbering referring to SEQ ID No. 1.

[0149] In one embodiment, the fragment of human ACE2 consists of the sequence according to SEQ ID No. 2 and comprises a H374N mutation, a H378N mutation, a L584A mutation and the following mutations: R697A, K702A, R705A, R708A, R710A and R716A, the numbering referring to the sequence according to SEQ ID No. 1.

[0150] In one embodiment, the fragment of human ACE2 consists of the sequence according to SEQ ID No. 3 and comprises a H374N mutation, a H378N mutation, a L584A mutation and the following mutations: R697A, K702A, R705A, R708A, R710A and R716A, the numbering referring to the sequence according to SEQ ID No. 1.

[0151] In one embodiment, the fragment of human ACE2 consists of the protein having the amino acid sequence according to SEQ ID No. 2 and comprises a R273A mutation, a L584A mutation and the following mutations: R697A, K702A, R705A, R708A, R710A and R716A, the numbering referring to the sequence according to SEQ ID No. 1.

[0152] In one embodiment, the fragment of human ACE2 consists of the protein having the amino acid sequence according to SEQ ID No. 3 and comprises a R273A mutation, a L584A mutation and the following mutations: R697A, K702A, R705A, R708A, R710A and R716A, the numbering referring to the sequence according to SEQ ID No. 1.

[0153] In one embodiment, the fragment of human ACE2 consists of the sequence according to SEQ ID No. 2 and comprises a mutation at at least one residue selected from amino acids 619, 621, 625, 697, 702, 705, 708, 710 and 716, the numbering referring to SEQ ID No. 1. In one embodiment, the fragment of human ACE2 consists of the sequence according to SEQ ID No. 2 and comprises a mutation at residues 619, 621, 625, 697, 702, 705, 708, 710 and 716, the numbering referring to SEQ ID No. 1. In one embodiment, the fragment of human ACE2 consists of the sequence according to SEQ ID No. 2 and comprises at least one of the following mutations: K619A, R621A, K625A, R697A, K702A, R705A, R708A, R710A and R716A, the numbering referring to SEQ ID No. 1. In one embodiment, the fragment of human ACE2 consists of the sequence according to SEQ ID No. 2 and comprises the following mutations: K619A, R621A, K625A, R697A, K702A, R705A, R708A, R710A and R716A, the numbering referring to SEQ ID No. 1.

[0154] In one embodiment, the fragment of human ACE2 consists of the sequence according to SEQ ID No. 3 and comprises a mutation at at least one residue selected from amino acids 619, 621, 625, 697, 702, 705, 708, 710 and 716, the numbering referring to SEQ ID No. 1. In one embodiment, the fragment of human ACE2 consists of the sequence according to SEQ ID No. 3 and comprises a mutation at residues 619, 621, 625, 697, 702, 705, 708, 710 and 716, the numbering referring to SEQ ID No. 1. In one embodiment, the fragment of human ACE2 consists of the sequence according to SEQ ID No. 3 and comprises at least one of the following mutations: K619A, R621A, K625A, R697A, K702A, R705A, R708A, R710A and R716A, the numbering referring to SEQ ID No. 1. In one embodiment, the fragment of human ACE2 consists of the sequence according to SEQ ID No. 3 and comprises the following mutations: K619A, R621A, K625A, R697A, K702A, R705A, R708A, R710A and R716A, the numbering referring to SEQ ID No. 1.

[0155] In one embodiment, the fragment of human ACE2 consists of the sequence according to SEQ ID No. 2 and comprises a H374N mutation, a H378N mutation, a L584A mutation and the following mutations: K619A, R621A, K625A, R697A, K702A, R705A, R708A, R710A and R716A, the numbering referring to the sequence according to SEQ ID No. 1.

[0156] In one embodiment, the fragment of human ACE2 consists of the sequence according to SEQ ID No. 3 and comprises a H374N mutation, a H378N mutation, a L584A mutation and the following mutations: K619A, R621A, K625A, R697A, K702A, R705A, R708A, R710A and R716A, the numbering referring to the sequence according to SEQ ID No. 1.

[0157] In one embodiment, the fragment of human ACE2 consists of the protein having the amino acid sequence according to SEQ ID No. 2 and comprises a R273A mutation, a L584A mutation and the following mutations: K619A, R621A, K625A, R697A, K702A, R705A, R708A, R710A and R716A, the numbering referring to the sequence according to SEQ ID No. 1.

[0158] In one embodiment, the fragment of human ACE2 consists of the protein having the amino acid sequence according to SEQ ID No. 3 and comprises a R273A mutation, a L584A mutation and the following mutations: K619A, R621A, K625A, R697A, K702A, R705A, R708A, R710A and R716A, the numbering referring to the sequence according to SEQ ID No. 1.

[0159] In one embodiment, the fragment of human ACE2 comprises or is identified by the sequence according to SEQ ID No. 2 and comprises a mutation at at least one residue selected from amino acids 697, 702, 705, 708, 710 and 716, the numbering referring to SEQ ID No. 1. In one embodiment, the fragment of human ACE2 comprises or is identified by the sequence according to SEQ ID No. 2 and comprises a mutation at residues 697, 702, 705, 708, 710 and 716, the numbering referring to SEQ ID No. 1. In one embodiment, the fragment of human ACE2 comprises or is identified by the sequence according to SEQ ID No. 2 and comprises at least one of the following mutations: R697A, K702A, R705A, R708A, R710A and R716A, the numbering referring to SEQ ID No. 1. In one embodiment, the fragment of human ACE2 comprises or is identified by the sequence according to SEQ ID No. 2 and comprises the following mutations: R697A, K702A, R705A, R708A, R710A and R716A, the numbering referring to SEQ ID No. 1.

[0160] In one embodiment, the fragment of human ACE2 comprises or is identified by the sequence according to SEQ ID No. 3 and comprises a mutation at at least one residue selected from amino acids 697, 702, 705, 708, 710 and 716, the numbering referring to SEQ ID No. 1. In one embodiment, the fragment of human ACE2 comprises or is identified by the sequence according to SEQ ID No. 3 and comprises a mutation at residues 697, 702, 705, 708, 710 and 716, the numbering referring to SEQ ID No. 1. In one embodiment, the fragment of human ACE2 comprises or is identified by the sequence according to SEQ ID No. 3 and comprises at least one of the following mutations: R697A, K702A, R705A, R708A, R710A and R716A, the numbering referring to SEQ ID No. 1. In one embodiment, the fragment of human ACE2 comprises or is identified by the sequence according to SEQ ID No. 3 and comprises the following mutations: R697A, K702A, R705A, R708A, R710A and R716A, the numbering referring to SEQ ID No. 1.

[0161] In one embodiment, the fragment of human ACE2 comprises or is identified by the sequence according to SEQ ID No. 2 and comprises a H374N mutation, a H378N mutation, a L584A mutation and the following mutations: R697A, K702A, R705A, R708A, R710A and R716A, the numbering referring to the sequence according to SEQ ID No. 1.

[0162] In one embodiment, the fragment of human ACE2 comprises or is identified by the sequence according to SEQ ID No. 3 and comprises a H374N mutation, a H378N mutation, a L584A mutation and the following mutations: R697A, K702A, R705A, R708A, R710A and R716A, the numbering referring to the sequence according to SEQ ID No. 1.

[0163] In one embodiment, the fragment of human ACE2 comprises or is identified by the sequence according to SEQ ID No. 2 and comprises a R273A mutation, a L584A mutation and the following mutations: R697A, K702A, R705A, R708A, R710A and R716A, the numbering referring to the sequence according to SEQ ID No. 1.

[0164] In one embodiment, the fragment of human ACE2 comprises or is identified by the sequence according to SEQ ID No. 3 and comprises a R273A mutation, a L584A mutation and the following mutations: R697A, K702A, R705A, R708A, R710A and R716A, the numbering referring to the sequence according to SEQ ID No. 1.

[0165] In one embodiment, the fragment of human ACE2 comprises or is identified by the sequence according to SEQ ID No. 2 and comprises a mutation at at least one residue selected from amino acids 619, 621, 625, 697, 702, 705, 708, 710 and 716, the numbering referring to SEQ ID No. 1. In one embodiment, the fragment of human ACE2 comprises or is identified by the sequence according to SEQ ID No. 2 and comprises a mutation at residues 619, 621, 625, 697, 702, 705, 708, 710 and 716, the numbering referring to SEQ ID No. 1. In one embodiment, the fragment of human ACE2 comprises or is identified by the sequence according to SEQ ID No. 2 and comprises at least one of the following mutations: K619A, R621A, K625A, R697A, K702A, R705A, R708A, R710A and R716A, the numbering referring to SEQ ID No. 1. In one embodiment, the fragment of human ACE2 comprises or is identified by the sequence according to SEQ ID No. 2 and comprises the following mutations: K619A, R621A, K625A, R697A, K702A, R705A, R708A, R710A and R716A, the numbering referring to SEQ ID No. 1.

[0166] In one embodiment, the fragment of human ACE2 comprises or is identified by the sequence according to SEQ ID No. 3 and comprises a mutation at at least one residue selected from amino acids 619, 621, 625, 697, 702, 705, 708, 710 and 716, the numbering referring to SEQ ID No. 1. In one embodiment, the fragment of human ACE2 comprises or is identified by the sequence according to SEQ ID No. 3 and comprises a mutation at residues 619, 621, 625, 697, 702, 705, 708, 710 and 716, the numbering referring to SEQ ID No. 1. In one embodiment, the fragment of human ACE2 comprises or is identified by the sequence according to SEQ ID No. 3 and comprises at least one of the following mutations: K619A, R621A, K625A, R697A, K702A, R705A, R708A, R710A and R716A, the numbering referring to SEQ ID No. 1. In one embodiment, the fragment of human ACE2 comprises or is identified by the sequence according to SEQ ID No. 3 and comprises the following mutations: K619A, R621A, K625A, R697A, K702A, R705A, R708A, R710A and R716A, the numbering referring to SEQ ID No. 1.

[0167] In one embodiment, the fragment of human ACE2 comprises or is identified by the sequence according to SEQ ID No. 2 and comprises a H374N mutation, a H378N mutation, a L584A mutation and the following mutations: K619A, R621A, K625A, R697A, K702A, R705A, R708A, R710A and R716A, the numbering referring to the sequence according to SEQ ID No. 1.

[0168] In one embodiment, the fragment of human ACE2 comprises or is identified by the sequence according to SEQ ID No. 3 and comprises a H374N mutation, a H378N mutation, a L584A mutation and the following mutations: K619A, R621A, K625A, R697A, K702A, R705A, R708A, R710A and R716A, the numbering referring to the sequence according to SEQ ID No. 1.

[0169] In one embodiment, the fragment of human ACE2 comprises or is identified by the sequence according to SEQ ID No. 2 and comprises a R273A mutation, a L584A mutation and the following mutations: K619A, R621A, K625A, R697A, K702A, R705A, R708A, R710A and R716A, the numbering referring to the sequence according to SEQ ID No. 1.

[0170] In one embodiment, the fragment of human ACE2 comprises or is identified by the sequence according to SEQ ID No. 3 and comprises a R273A mutation, a L584A mutation and the following mutations: K619A, R621A, K625A, R697A, K702A, R705A, R708A, R710A and R716A, the numbering referring to the sequence according to SEQ ID No. 1.

[0171] Another variant of the fragment of human ACE2 may be a variant which provides an additional cysteine for the formation of disulfide bridges between two ACE2 molecules. The disulfide bridge increases the intrinsic stability of the fusion protein and may also have an effect on the binding of the fusion protein to its target. The additional cysteine may be provided by a substitution of serine 645 in the numbering of SEQ ID NO. 1 with cysteine.

[0172] Hence, in one embodiment, the variant of the fragment of human ACE2 comprises a S645C mutation, the numbering referring to SEQ ID No. 1.

[0173] In one embodiment, the fragment of human ACE2 consists of the sequence according to SEQ ID No. 2 and comprises a S645C mutation, the numbering referring to SEQ ID No. 1. In one embodiment, the variant of the fragment of human ACE2 consists of a protein having the amino acid sequence according to SEQ ID No. 28.

[0174] In one embodiment, the fragment of human ACE2 consists of the sequence according to SEQ ID No. 3 and comprises a S645C mutation, the numbering referring to SEQ ID No. 1. In one embodiment, the variant of the fragment of human ACE2 consists of a protein having the amino acid sequence according to SEQ ID No. 29.

[0175] In one embodiment, the fragment of human ACE2 consists of a protein having the amino acid sequence according to SEQ ID No. 2 and comprises a H374N mutation, a H378N mutation, and a S645C mutation, the numbering referring to SEQ ID No. 1. In one embodiment, the variant of the fragment of human ACE2 consists of a protein having the amino acid sequence according to SEQ ID No. 32.

[0176] In one embodiment, the fragment of human ACE2 consists of a protein having the amino acid sequence according to SEQ ID No. 3 and comprises a H374N mutation, a H378N mutation, and a S645C mutation, the numbering referring to SEQ ID No. 1. In one embodiment, the variant of the fragment of human ACE2 consists of a protein having the amino acid sequence according to SEQ ID No. 33.

[0177] In one embodiment, the fragment of human ACE2 consists of the sequence according to SEQ ID No. 2 and comprises a H374N mutation, a H378N mutation, a L584A mutation and a S645C mutation, the numbering referring to SEQ ID No. 1.

[0178] In one embodiment, the fragment of human ACE2 consists of the sequence according to SEQ ID No. 3 and comprises a H374N mutation, a H378N mutation, a L584A mutation and a S645C mutation, the numbering referring to SEQ ID No. 1.

[0179] In one embodiment, the fragment of human ACE2 consists of a protein having the amino acid sequence according to SEQ ID No. 2 and comprises a R273A mutation, and a S645C mutation, the numbering referring to SEQ ID No. 1. In one embodiment, the variant of the fragment of human ACE2 consists of a protein having the amino acid sequence according to SEQ ID No. 36.

[0180] In one embodiment, the fragment of human ACE2 consists of a protein having the amino acid sequence according to SEQ ID No. 3 and comprises a R273A mutation and a S645C mutation, the numbering referring to SEQ ID No. 1. In one embodiment, the variant of the fragment of human ACE2 consists of a protein having the amino acid sequence according to SEQ ID No. 37.

[0181] In one embodiment, the fragment of human ACE2 consists of a protein having the amino acid sequence according to SEQ ID No. 2 and comprises a R273A mutation, a L584A mutation and a S645C mutation, the numbering referring to SEQ ID No. 1.

[0182] In one embodiment, the fragment of human ACE2 consists of a protein having the amino acid sequence according to SEQ ID No. 3 and comprises a R273A mutation, a L584A mutation and a S645C mutation, the numbering referring to SEQ ID No. 1.

[0183] In one embodiment, the fragment of human ACE2 comprises or is identified by the sequence according to SEQ ID No. 2 and comprises a S645C mutation, the numbering referring to SEQ ID No. 1.

[0184] In one embodiment, the fragment of human ACE2 comprises or is identified by the sequence according to SEQ ID No. 3 and comprises a S645C mutation, the numbering referring to SEQ ID No. 1.

[0185] In one embodiment, the fragment of human ACE2 comprises or is identified by the sequence according to SEQ ID No. 2 and comprises a H374N mutation, a H378N mutation and a S645C mutation, the numbering referring to SEQ ID No. 1.

[0186] In one embodiment, the fragment of human ACE2 comprises or is identified by the sequence according to SEQ ID No. 3 and comprises a H374N mutation, a H378N mutation and a S645C mutation, the numbering referring to SEQ ID No. 1.

[0187] In one embodiment, the fragment of human ACE2 comprises or is identified by the sequence according to SEQ ID No. 2 and comprises a H374N mutation, a H378N mutation, a L584A mutation and a S645C mutation, the numbering referring to SEQ ID No. 1.

[0188] In one embodiment, the fragment of human ACE2 comprises or is identified by the sequence according to SEQ ID No. 3 and comprises a H374N mutation, a H378N mutation, a L584A mutation and a S645C mutation, the numbering referring to SEQ ID No. 1.

[0189] In one embodiment, the fragment of human ACE2 comprises or is identified by the sequence according to SEQ ID No. 2 and comprises a R273A mutation and a S645C mutation, the numbering referring to SEQ ID No. 1.

[0190] In one embodiment, the fragment of human ACE2 comprises or is identified by the sequence according to SEQ ID No. 3 and comprises a R273A and a S645C mutation, the numbering referring to SEQ ID No. 1.

[0191] In one embodiment, the fragment of human ACE2 comprises or is identified by the sequence according to SEQ ID No. 2 and comprises a R273A mutation, a L584A mutation and a S645C mutation, the numbering referring to SEQ ID No. 1.

[0192] In one embodiment, the fragment of human ACE2 comprises or is identified by the sequence according to SEQ ID No. 3 and comprises a R273A mutation, a L584A mutation and a S645C mutation, the numbering referring to SEQ ID No. 1.

[0193] Another variant of the fragment of human ACE2 may be a variant which inhibits dimerization. Hence, in one embodiment the variant of the fragment of human ACE2 comprises a mutation at amino acid Q139, the numbering referring to SEQ ID No. 1. In one embodiment the variant of the fragment of human ACE2 comprises a Q139A mutation, the numbering referring to SEQ ID No. 1.

[0194] In one embodiment, the fragment of human ACE2 consists of the sequence according to SEQ ID No. 2 and comprises a Q139A mutation, the numbering referring to SEQ ID No. 1.

[0195] In one embodiment, the fragment of human ACE2 consists of the sequence according to SEQ ID No. 3 and comprises a Q139A mutation, the numbering referring to SEQ ID No. 1.

[0196] In one embodiment, the fragment of human ACE2 consists of the protein having the amino acid sequence according to SEQ ID No. 2 and comprises a H374N mutation, a H378N mutation and a Q139A mutation, the numbering referring to SEQ ID No. 1.

[0197] In one embodiment, the fragment of human ACE2 consists of the protein having the amino acid sequence according to SEQ ID No. 3 and comprises a H374N mutation, a H378N mutation and a Q139A mutation, the numbering referring to SEQ ID No. 1.

[0198] In one embodiment, the fragment of human ACE2 consists of the sequence according to SEQ ID No. 2 and comprises a H374N mutation, a H378N mutation, a L584A mutation and a Q139A mutation, the numbering referring to SEQ ID No. 1.

[0199] In one embodiment, the fragment of human ACE2 consists of the sequence according to SEQ ID No. 3 and comprises a H374N mutation, a H378N mutation, a L584A mutation and a Q139A mutation, the numbering referring to SEQ ID No. 1.

[0200] In one embodiment, the fragment of human ACE2 consists of the protein having the amino acid sequence according to SEQ ID No. 2 and comprises a R273A mutation and a Q139A mutation, the numbering referring to SEQ ID No. 1.

[0201] In one embodiment, the fragment of human ACE2 consists of the protein having the amino acid sequence according to SEQ ID No. 3 and comprises a R273A mutation and a Q139A mutation, the numbering referring to SEQ ID No. 1.

[0202] In one embodiment, the fragment of human ACE2 consists of the protein having the amino acid sequence according to SEQ ID No. 2 and comprises a R273A mutation, a L584A mutation and a Q139A mutation, the numbering referring to SEQ ID No. 1.

[0203] In one embodiment, the fragment of human ACE2 consists of the protein having the amino acid sequence according to SEQ ID No. 3 and comprises a R273A mutation, a L584A mutation and a Q139A mutation, the numbering referring to SEQ ID No. 1.

[0204] In one embodiment, the fragment of human ACE2 consists of the sequence according to SEQ ID No. 14 and comprises a Q139A mutation, the numbering referring to SEQ ID No. 1.

[0205] In one embodiment, the fragment of human ACE2 consists of the sequence according to SEQ ID No. 14 and comprises a H374N mutation, a H378N mutation, a L584A mutation and a Q139A mutation, the numbering referring to SEQ ID No. 1.

[0206] In one embodiment, the fragment of human ACE2 consists of the protein having the amino acid sequence according to SEQ ID No. 14 and comprises a R273A mutation, a L584A mutation and a Q139A mutation, the numbering referring to SEQ ID No. 1.

[0207] In one embodiment, the fragment of human ACE2 comprises or is identified by the sequence according to SEQ ID No. 2 and comprises a Q139A mutation, the numbering referring to SEQ ID No. 1.

[0208] In one embodiment, the fragment of human ACE2 comprises or is identified by the sequence according to SEQ ID No. 3 and comprises a Q139A mutation, the numbering referring to SEQ ID No. 1.

[0209] In one embodiment, the fragment of human ACE2 comprises or is identified by the sequence according to SEQ ID No. 2 and comprises a H374N mutation, a H378N mutation and a Q139A mutation, the numbering referring to SEQ ID No. 1.

[0210] In one embodiment, the fragment of human ACE2 comprises or is identified by the sequence according to SEQ ID No. 3 and comprises a H374N mutation, a H378N mutation and a Q139A mutation, the numbering referring to SEQ ID No. 1.

[0211] In one embodiment, the fragment of human ACE2 comprises or is identified by the sequence according to SEQ ID No. 2 and comprises a H374N mutation, a H378N mutation, a L584A mutation and a Q139A mutation, the numbering referring to SEQ ID No. 1.

[0212] In one embodiment, the fragment of human ACE2 comprises or is identified by the sequence according to SEQ ID No. 3 and comprises a H374N mutation, a H378N mutation, a L584A mutation and a Q139A mutation, the numbering referring to SEQ ID No. 1.

[0213] In one embodiment, the fragment of human ACE2 comprises or is identified by the sequence according to SEQ ID No. 2 and comprises a R273A mutation and a Q139A mutation, the numbering referring to SEQ ID No. 1.

[0214] In one embodiment, the fragment of human ACE2 comprises or is identified by the sequence according to SEQ ID No. 3 and comprises a R273A mutation and a Q139A mutation, the numbering referring to SEQ ID No. 1.

[0215] In one embodiment, the fragment of human ACE2 comprises or is identified by the sequence according to SEQ ID No. 2 and comprises a R273A mutation, a L584A mutation and a Q139A mutation, the numbering referring to SEQ ID No. 1.

[0216] 25 In one embodiment, the fragment of human ACE2 comprises or is identified by the sequence according to SEQ ID No. 3 and comprises a R273A mutation, a L584A mutation and a Q139A mutation, the numbering referring to SEQ ID No. 1.

[0217] In one embodiment, the fragment of human ACE2 comprises or is identified by the sequence according to SEQ ID No. 14 and comprises a Q139A mutation, the numbering referring to SEQ ID No. 1.

[0218] In one embodiment, the fragment of human ACE2 comprises or is identified by the sequence according to SEQ ID No. 14 and comprises a H374N mutation, a H378N mutation and a Q139A mutation, the numbering referring to SEQ ID No. 1.

[0219] In one embodiment, the fragment of human ACE2 comprises or is identified by the sequence according to SEQ ID No. 14 and comprises a H374N mutation, a H378N mutation, a L584A mutation and a Q139A mutation, the numbering referring to SEQ ID No. 1.

[0220] In one embodiment, the fragment of human ACE2 comprises or is identified by the sequence according to SEQ ID No. 14 and comprises a R273A mutation and a Q139A mutation, the numbering referring to SEQ ID No. 1.

[0221] In one embodiment, the fragment of human ACE2 comprises or is identified by the sequence according to SEQ ID No. 14 and comprises a R273A mutation, a L584A mutation and a Q139A mutation, the numbering referring to SEQ ID No. 1.

[0222] In one embodiment, the second part of the fusion protein of the present invention comprises the Fc portion of human IgG. The Fc portion of human IgG may be the Fc portion of IgG1, IgG2, IgG3 or IgG4.

[0223] In one embodiment, the second part of the fusion protein of the present invention comprises the Fc portion of human IgG4. The Fc portion of human IgG4 comprises the CH2 and CH3 domains of human IgG4 linked together to form the Fc portion. In a full-length human IgG4 antibody the Fc portion is connected to the Fab fragment through a hinge region. The Fab fragment comprises the heavy chain variable region and the CH1 domain. Preferably, the Fc portion of human IgG4 used in the fusion protein of the present invention has the sequence according to SEQ ID No. 5.

[0224] Since the IgG4 subclass of antibodies has only a partial affinity for Fc gamma receptor and does not activate complement (see Muhammed (2020) Immunome Res. 16(1): 173), it does not activate the immune system to the same extent as the IgG1 subclass of antibodies. Consequently, the cytokine expression is stimulated to a lower extent and the risk for a cytokine storm is reduced. The IgG4 subclass of antibodies is able to bind to FcRn.

[0225] “A variant of the Fc portion of human IgG4” refers to the Fc portion of human IgG4 which has one or more amino acid substitutions compared to the wild-type Fc portion of human IgG4 according to SEQ ID No. 5. In one embodiment, the variant of the Fc portion of human IgG4 has one to twelve, one to eleven, one to ten, one to nine, one to eight, one to seven, one to six, one to five, one to four, one to three, one or two amino acid substitutions compared to the wild-type Fc portion of human IgG4 according to SEQ ID No. 5. In one embodiment, the variant of the Fc portion of human IgG4 has one, two, three, four, five, six, seven, eight, nine, ten, eleven or twelve amino acid substitutions compared to the wild-type Fc portion of human IgG4 according to SEQ ID No. 5. In one embodiment, the one or more amino acid substitutions lead to decreased effector functions compared to the wild-type Fc portion of human IgG4 according to SEQ ID No. 5. In one embodiment, the one or more amino acid substitutions lead to an increased half-life compared to the wild-type Fc portion of human IgG4 according to SEQ ID No. 5. In one embodiment, the one or more amino acid substitutions lead to decreased effector functions compared to the wild-type Fc portion of human IgG4 according to SEQ ID No. 5 and to an increased half-life compared to the wild-type Fc portion of human IgG4 according to SEQ ID No. 5.

[0226] In one embodiment, the one or more amino acid substitutions do not produce the wild-type Fc portion of IgG1 according to SEQ ID No. 16. In one embodiment, the one or more amino acid substitutions do not impart upon the altered IgG4 Fc portion the effector functions of wild-type IgG1.

[0227] Preferably, the decreased effector functions comprise a decreased complement-dependent cytotoxicity (CDC). More preferably, the CDC is decreased by at least two-fold, at least three-fold, at least four-fold or at least five-fold compared to the CDC of the wild-type Fc portion of human IgG4 according to SEQ ID No. 5. Methods to determine and quantify CDC are well-known to the skilled person. In general, CDC can be determined by incubating the Fc portion fused to an antigen-binding portion with suitable target cells and complement and detecting the cell death of the target cells. Complement recruitment can be analyzed with a C1q binding assay using ELISA plates (see, e.g., Schlothauer et al. (2016) Protein Eng. Des. Sel. 29(10): 457-466).

[0228] In one embodiment, the variant of the Fc portion of human IgG4 comprises at least one amino acid substitution at an amino acid residue selected from F3, L4, G6, P7, F12, V33, N66 and P98 of the sequence according to SEQ ID No. 5. These amino acid residues correspond to amino acid residues F234, L235, G237, P238, F243, V264, N297 and P329 of full-length human IgG4. It was shown that amino acid substitutions at these residues lead to a reduced effector function (WO 94/28027; WO 94/29351; WO 95/26403; WO 2011/066501; WO 2011/149999; WO 2012/130831; Wang et al. (2018) Protein Cell. 9(1): 63-73).

[0229] In one embodiment, the variant of the Fc portion of human IgG4 comprises the amino acid substitution L4E/A in the sequence according to SEQ ID No. 5 which corresponds to the amino acid substitution L235E/A in the amino acid sequence of full-length human IgG4. This variant has a reduced effector function, in particular reduced CDC.

[0230] In one embodiment, the variant of the Fc portion of human IgG4 comprises the amino acid substitutions F3A and L4A in the sequence according to SEQ ID No. 5 which correspond to the amino acid substitutions F234A and L235A in the amino acid sequence of full-length human IgG4. This variant has a reduced effector function, in particular reduced CDC.

[0231] In one embodiment, the variant of the Fc portion of human IgG4 comprises the amino acid substitutions F3A, L4E, G6A and P7S in the sequence according to SEQ ID No. 5 which correspond to the amino acid substitutions F234A, L235E, G237A and P238S in the amino acid sequence of full-length human IgG4. This variant has a reduced effector function, in particular reduced CDC.

[0232] In one embodiment, the variant of the Fc portion of human IgG4 comprises the amino acid substitutions F12A and V33A in the sequence according to SEQ ID No. 5 which correspond to the amino acid substitutions F243A and V264A in the amino acid sequence of full-length human IgG4. This variant has a reduced effector function, in particular reduced CDC.

[0233] In one embodiment, the variant of the Fc portion of human IgG4 comprises the amino acid substitutions L4E and P98G in the sequence according to SEQ ID No. 5 which correspond to the amino acid substitutions L235E and P329G in the amino acid sequence of full-length human IgG4. This variant has a reduced effector function, in particular reduced CDC.

[0234] In one embodiment, the variant of the Fc portion of human IgG4 comprises the amino acid substitution N66A/Q/G in the sequence according to SEQ ID No. 5 which corresponds to the amino acid substitution N297A/Q/G in the amino acid sequence of full-length human IgG4. This variant has a reduced effector function, in particular reduced CDC.

[0235] In one embodiment, the variant of the Fc portion of human IgG4 comprises at least one amino acid substitution at an amino acid residue selected from T250, M252, S254, T256, E258, K288, T307, V308, Q311, V427, M428, H433, N434 and H435 of full-length human IgG4. These amino acid residues correspond to amino acid residues T19, M21, S23, T25, E27, K57, T76, V77, Q80, V196, M197, H202, N203 and H204 of the sequence according to SEQ ID No. 5. It was shown that these amino acid substitutions lead to an increased half-life of the Fc-containing protein (WO 00/42072; WO 02/060919; WO 2004/035752; WO 2006/053301; WO 2009/058492; WO 2009/086320; US 2010/0204454; GB 2013/02878; WO 2013/163630; US 2019/0010243). The half-life of an antibody or Fc fusion protein can be determined by measuring the antibody or Fc fusion protein concentration in the serum at different time-points after administration of the antibody or Fc fusion protein and calculating the half-life therefrom.

[0236] In one embodiment, the variant of the Fc portion of human IgG4 comprises the amino acid substitutions M21Y, S23T and T25E in the sequence according to SEQ ID No. 5 which corresponds to the amino acid substitutions M252Y, S254T and T256E in the amino acid sequence of full-length human IgG4. In one embodiment, the variant of the Fc portion of human IgG4 has the amino acid sequence according to SEQ ID No. 44. This variant has an increased half-life.

[0237] In one embodiment, the variant of the Fc portion of human IgG4 comprises the amino acid substitutions T25D and T76Q in the sequence according to SEQ ID No. 5 which corresponds to the amino acid substitutions T256D and T307Q in the amino acid sequence of full-length human IgG4. In one embodiment, the variant of the Fc portion of human IgG4 has the amino acid sequence according to SEQ ID No. 60. This variant has an increased half-life and an enhanced binding to FcRn (Mackness et al. (2019) MABS 11(7): 1276-1288).

[0238] In one embodiment, the variant of the Fc portion of human IgG4 comprises the amino acid substitutions T19Q/E and M197L/F in the sequence according to SEQ ID No. 5 which corresponds to the amino acid substitutions T250Q/E and M428L/F in the amino acid sequence of full-length human IgG4. This variant has an increased half-life.

[0239] In one embodiment, the variant of the Fc portion of human IgG4 comprises the amino acid substitutions N2035 and V77W/Y/F in the sequence according to SEQ ID No. 5 which corresponds to the amino acid substitutions N434S and V308W/Y/F in the amino acid sequence of full-length human IgG4. This variant has an increased half-life.

[0240] In one embodiment, the variant of the Fc portion of human IgG4 comprises the amino acid substitutions M21Y and M197L in the sequence according to SEQ ID No. 5 which corresponds to the amino acid substitutions M252Y and M428L in the amino acid sequence of full-length human IgG4. This variant has an increased half-life.

[0241] In one embodiment, the variant of the Fc portion of human IgG4 comprises the amino acid substitutions T76Q and N2035 in the sequence according to SEQ ID No. 5 which corresponds to the amino acid substitutions T307Q and N434S in the amino acid sequence of full-length human IgG4. This variant has an increased half-life.

[0242] In one embodiment, the variant of the Fc portion of human IgG4 comprises the amino acid substitutions M197L and V77F in the sequence according to SEQ ID No. 5 which corresponds to the amino acid substitutions M428L and V308F in the amino acid sequence of full-length human IgG4. This variant has an increased half-life.

[0243] In one embodiment, the variant of the Fc portion of human IgG4 comprises the amino acid substitutions Q80V and N2035 in the sequence according to SEQ ID No. 5 which corresponds to the amino acid substitutions Q311V and N434S in the amino acid sequence of full-length human IgG4. This variant has an increased half-life.

[0244] In one embodiment, the variant of the Fc portion of human IgG4 comprises the amino acid substitutions H202K and N203F in the sequence according to SEQ ID No. 5 which corresponds to the amino acid substitutions H433K and N434F in the amino acid sequence of full-length human IgG4. This variant has an increased half-life.

[0245] In one embodiment, the variant of the Fc portion of human IgG4 comprises the amino acid substitutions E27F and V196T in the sequence according to SEQ ID No. 5 which corresponds to the amino acid substitutions E258F and V427T in the amino acid sequence of full-length human IgG4. This variant has an increased half-life.

[0246] In one embodiment, the variant of the Fc portion of human IgG4 comprises the amino acid substitutions K57E and H204K in the sequence according to SEQ ID No. 5 which corresponds to the amino acid substitutions K288E and H435K in the amino acid sequence of full-length human IgG4. This variant has an increased half-life.

[0247] In one embodiment, the variant of the Fc portion of human IgG4 comprises the amino acid substitution R178K in the sequence according to SEQ ID No. 5 which corresponds to the amino acid substitution R409K in the amino acid sequence of full-length human IgG4. This variant prevents acid-induced aggregation of human IgG4 (see Namisaki et al. (2020) PloS ONE 15(3): e0229027).

[0248] In one embodiment, the variant of the Fc portion of human IgG4 does not comprise an amino acid substitution at one or more of positions 37, 43, 65, 96, 99, 100, 124, 125, 127, 187 and 214 in the sequence according to SEQ ID No. 5. In one embodiment, the variant of the Fc portion of human IgG4 does not comprise one or more of the amino acid substitutions Q37H, Q43K, F65Y, G96A, S99A, S100P, Q124R, E125D, M127L, R178K, E187Q and L214P. In one embodiment, the variant of the Fc portion of human IgG4 does not comprise any amino acid substitution at any of the positions 37, 43, 65, 96, 99, 100, 124, 125, 127, 187 and 214 in the sequence according to SEQ ID No. 5. In one embodiment, the variant of the Fc portion of human IgG4 does not comprise any of the amino acid substitutions Q37H, Q43K, F65Y, G96A, S99A, S100P, Q124R, E125D, M127L, R178K, E187Q and L214P.

[0249] In one embodiment, the second part of the fusion protein of the present invention comprises the Fc portion of human IgG1 or a variant thereof. The Fc portion of human IgG1 comprises the CH2 and CH3 domains of human IgG1 linked together to form the Fc portion. In a full-length human IgG1 antibody the Fc portion is connected to the Fab fragment through a hinge region. The Fab fragment comprises the heavy chain variable region and the CH1 domain. Preferably, the Fc portion of human IgG1 used in the fusion protein of the present invention has the sequence according to SEQ ID No. 16.

[0250] “A variant of the Fc portion of human IgG1” refers to the Fc portion of human IgG1 which has one or more amino acid substitutions compared to the wild-type Fc portion of human IgG1 according to SEQ ID No. 16. In one embodiment, the one or more amino acid substitutions lead to decreased effector functions compared to the wild-type Fc portion of human IgG1 according to SEQ ID No. 16.

[0251] Preferably, the decreased effector functions comprise a decreased complement-dependent cytotoxicity (CDC). More preferably, the CDC is decreased by at least two-fold, at least three-fold, at least four-fold or at least five-fold compared to the CDC of the wild-type Fc portion of human IgG1 according to SEQ ID No. 16. Methods to determine and quantify CDC are well-known to the skilled person and have been described above.

[0252] In one embodiment, the variant of the Fc portion of human IgG1 comprises at least one amino acid substitution at an amino acid residue selected from L3, L4 and P98 of the sequence according to SEQ ID No. 16. These amino acid residues correspond to amino acid residues L234, L235, and P329 of full-length human IgG1.

[0253] In one embodiment, the variant of the Fc portion of human IgG1 comprises the amino acid substitution L4E/A in the sequence according to SEQ ID No. 16 which corresponds to the amino acid substitution L235E/A in the amino acid sequence of full-length human IgG1. This variant has a reduced effector function, in particular reduced CDC.

[0254] In one embodiment, the variant of the Fc portion of human IgG1 comprises the amino acid substitutions L3A and L4A in the sequence according to SEQ ID No. 16 which correspond to the amino acid substitutions L234A and L235A in the amino acid sequence of full-length human IgG1. This variant has a reduced effector function, in particular reduced CDC.

[0255] In one embodiment, the variant of the Fc portion of human IgG1 comprises the amino acid substitutions L3A, L4A, P98G in the sequence according to SEQ ID No. 16 which correspond to the amino acid substitutions L234A, L235A and P329G in the amino acid sequence of full-length human IgG1. This variant has a reduced effector function, in particular reduced CDC.

[0256] In one embodiment, the variant of the Fc portion of human IgG1 comprises the amino acid substitutions L4A and P98G in the sequence according to SEQ ID No. 16 which correspond to the amino acid substitutions L235A and P329G in the amino acid sequence of full-length human IgG1. This variant has a reduced effector function, in particular reduced CDC.

[0257] In one embodiment, the variant of the Fc portion of human IgG1 comprises the amino acid substitutions M21Y, S23T and T25E in the sequence according to SEQ ID No. 16 which corresponds to the amino acid substitutions M252Y, S254T and T256E in the amino acid sequence of full-length human IgG1. In one embodiment, the variant of the Fc portion of human IgG1 has the amino acid sequence according to SEQ ID No. 19. This variant has an increased half-life and an enhanced binding to FcRn.

[0258] In one embodiment, the variant of the Fc portion of human IgG1 comprises the amino acid substitutions T25D and T76Q in the sequence according to SEQ ID No. 16 which corresponds to the amino acid substitutions T256D and T307Q in the amino acid sequence of full-length human IgG1. In one embodiment, the variant of the Fc portion of human IgG1 has the amino acid sequence according to SEQ ID No. 59. This variant has an increased half-life and an enhanced binding to FcRn (Mackness et al. (2019) MABS 11(7): 1276-1288).

[0259] In one embodiment, the second part of the fusion protein of the present invention comprises the Fc portion of human IgG2 or IgG3 or a variant of the Fc portion of human IgG1, IgG2 or IgG3 and has reduced binding to FcγRIIIa compared to a fusion protein comprising the same first part and a second part comprising the Fc portion of wild-type human IgG1. The binding to FcγRIIIa is decreased by at least two-fold, at least three-fold, at least four-fold, at least five-fold or at least 10-fold compared to the binding of a fusion protein comprising the same first part and a second part comprising the Fc portion of wild-type human IgG1 according to SEQ ID No. 16.

[0260] In one embodiment, the second part of the fusion protein of the present invention comprises the Fc portion of human IgG2 or IgG3 or a variant of the Fc portion of human IgG1, IgG2 or IgG3 and has reduced binding to FcγRIIIa and essentially the same binding to FcRn compared to a fusion protein comprising the same first part and a second part comprising the Fc portion of wild-type human IgG1. The term “essentially the same binding to FcRn” means that the binding of the fusion protein comprising the Fc portion of human IgG2 or IgG3 or a variant of the Fc portion of human IgG1, IgG2 or IgG3 to FcRn differs by not more than 20% or not more than 15%, preferably not more than 10% or not more than 5%, more preferably not more than 3% or not more than 2% and most preferably not more than 1% from the binding of a fusion protein comprising the same first part and a second part comprising the Fc portion of wild-type human IgG1 according to SEQ ID No. 16.

[0261] The binding of fusion proteins to FcγRIIIa or FcRn can be determined by surface plasmon resonance as described in the examples herein.

[0262] In one embodiment, the first and the second part of the fusion protein of the present invention are linked by a linking sequence. The linking sequence is a short amino acid sequence which does not have a function on its own and which does not affect the folding of the fusion protein. In one embodiment, the linking sequence comprises eight to twenty amino acids, preferably 10 to 18 amino acids, more preferably 11 to 17 amino acids or 12 to 16 amino acids and most preferably 13 amino acids.

[0263] In one embodiment, the linking sequence consists of small amino acids selected from glycine and serine. An overview of linking sequences is provided in Chen et al. (2013) Adv. Drug Deliv. Rev. 65(10): 1357-1369.

[0264] In one embodiment, if the second part of the fusion protein is the Fc portion of human IgG4 or a variant thereof, the linking sequence consists of the hinge region of human IgG4. In one embodiment, the linking sequence consists of the sequence according to SEQ ID No. 4. In the sequence according to SEQ ID No. 4 the serine at residue 10 of the wild-type hinge region of IgG4 (corresponding to serine 228 of full-length IgG4) has been replaced with proline, leading to a reduction in the exchange of IgG half-molecules. It is known that IgG4 antibodies can undergo Fab-arm exchange, leading to the combination of two distinct Fab arms and creating new bispecific antibody molecules (see, e.g., Aalberse et al. (2009) Clin. Exp. Allergy 39(4): 469-477). This Fab-arm exchange can be prevented by a mutation of serine 228 of the Fc region to proline (S228P; see Silva et al. (2015) J. Biol. Chem. 290: 5462-5469) which is located in the hinge region of IgG4. Further, the use of a short linker sequence increases the stability of the fusion protein and lowers the accessibility of the fusion protein to proteases.

[0265] In one embodiment, if the second part of the fusion protein is the Fc portion of human IgG1 or a variant thereof, the linking sequence consists of the hinge region of human IgG1. In one embodiment, the linking sequence consists of the sequence according to SEQ ID No. 15.

[0266] In a particular embodiment, the fusion protein of the present invention has the amino acid sequence according to SEQ ID No. 20 which comprises amino acids 18 to 732 of human ACE2 (SEQ ID No. 2), the linking sequence according to SEQ ID No. 15 and the variant of the Fc portion of human IgG1 according to SEQ ID No. 19.

[0267] In a particular embodiment, the fusion protein of the present invention has the amino acid sequence according to SEQ ID No. 21 which comprises amino acids 18 to 740 of human ACE2 (SEQ ID No. 3), the linking sequence according to SEQ ID No. 15 and the variant of the Fc portion of human IgG1 according to SEQ ID No. 19.

[0268] In a particular embodiment, the fusion protein of the present invention has the amino acid sequence according to SEQ ID No. 22 which comprises amino acids 18 to 732 of human ACE2 (SEQ ID No. 2) with a H374N and H378N mutation, the numbering referring to SEQ ID No. 1, the linking sequence according to SEQ ID No. 15 and the variant of the Fc portion of human IgG1 according to SEQ ID No. 19.

[0269] In a particular embodiment, the fusion protein of the present invention has the amino acid sequence according to SEQ ID No. 23 which comprises amino acids 18 to 740 of human ACE2 (SEQ ID No. 3) with a H374N and H378N mutation, the numbering referring to SEQ ID No. 1, the linking sequence according to SEQ ID No. 15 and the variant of the Fc portion of human IgG1 according to SEQ ID No. 19.

[0270] In a particular embodiment, the fusion protein of the present invention has the amino acid sequence according to SEQ ID No. 26 which comprises amino acids 18 to 732 of human ACE2 (SEQ ID No. 2) with a R273A mutation, the numbering referring to SEQ ID No. 1, the linking sequence according to SEQ ID No. 15 and the variant of the Fc portion of human IgG1 according to SEQ ID No. 19.

[0271] In a particular embodiment, the fusion protein of the present invention has the amino acid sequence according to SEQ ID No. 27 which comprises amino acids 18 to 740 of human ACE2 (SEQ ID No. 3) with a R273A mutation, the numbering referring to SEQ ID No. 1, the linking sequence according to SEQ ID No. 15 and the variant of the Fc portion of human IgG1 according to SEQ ID No. 19.

[0272] In a particular embodiment, the fusion protein of the present invention has the amino acid sequence according to SEQ ID No. 30 which comprises amino acids 18 to 732 of human ACE2 (SEQ ID No. 2) with a S645C mutation, the numbering referring to SEQ ID No. 1, the linking sequence according to SEQ ID No. 15 and the variant of the Fc portion of human IgG1 according to SEQ ID No. 19.

[0273] In a particular embodiment, the fusion protein of the present invention has the amino acid sequence according to SEQ ID No. 31 which comprises amino acids 18 to 740 of human ACE2 (SEQ ID No. 3) with a S645C mutation, the numbering referring to SEQ ID No. 1, the linking sequence according to SEQ ID No. 15 and the variant of the Fc portion of human IgG1 according to SEQ ID No. 19.

[0274] In a particular embodiment, the fusion protein of the present invention has the amino acid sequence according to SEQ ID No. 34 which comprises amino acids 18 to 732 of human ACE2 (SEQ ID No. 2) with a S645C mutation, a H374N mutation and a H378N mutation, the numbering referring to SEQ ID No. 1, the linking sequence according to SEQ ID No. 15 and the variant of the Fc portion of human IgG1 according to SEQ ID No. 19.

[0275] In a particular embodiment, the fusion protein of the present invention has the amino acid sequence according to SEQ ID No. 35 which comprises amino acids 18 to 740 of human ACE2 (SEQ ID No. 3) with a S645C mutation, a H374N mutation and a H378N mutation, the numbering referring to SEQ ID No. 1, the linking sequence according to SEQ ID No. 15 and the variant of the Fc portion of human IgG1 according to SEQ ID No. 19.

[0276] In a particular embodiment, the fusion protein of the present invention has the amino acid sequence according to SEQ ID No. 38 which comprises amino acids 18 to 732 of human ACE2 (SEQ ID No. 2) with a S645C mutation and a R273A mutation, the numbering referring to SEQ ID No. 1, the linking sequence according to SEQ ID No. 15 and the variant of the Fc portion of human IgG1 according to SEQ ID No. 19.

[0277] In a particular embodiment, the fusion protein of the present invention has the amino acid sequence according to SEQ ID No. 39 which comprises amino acids 18 to 740 of human ACE2 (SEQ ID No. 3) with a S645C mutation and a R273A mutation, the numbering referring to SEQ ID No. 1, the linking sequence according to SEQ ID No. 15 and the variant of the Fc portion of human IgG1 according to SEQ ID No. 19.

[0278] In a particular embodiment, the fusion protein of the present invention has the amino acid sequence according to SEQ ID No. 40 which comprises amino acids 18 to 732 of human ACE2 (SEQ ID No. 2) with a S645C mutation, the numbering referring to SEQ ID No. 1, the linking sequence according to SEQ ID No. 15 and the Fc portion of human IgG1 according to SEQ ID No. 16.

[0279] In a particular embodiment, the fusion protein of the present invention has the amino acid sequence according to SEQ ID No. 41 which comprises amino acids 18 to 740 of human ACE2 (SEQ ID No. 3) with a S645C mutation, the numbering referring to SEQ ID No. 1, the linking sequence according to SEQ ID No. 15 and the Fc portion of human IgG1 according to SEQ ID No. 16.

[0280] In a particular embodiment, the fusion protein of the present invention has the amino acid sequence according to SEQ ID No. 42 which comprises amino acids 18 to 732 of human ACE2 (SEQ ID No. 2) with a S645C mutation, the numbering referring to SEQ ID No. 1, the linking sequence according to SEQ ID No. 4 and the Fc portion of human IgG4 according to SEQ ID No. 5.

[0281] In a particular embodiment, the fusion protein of the present invention has the amino acid sequence according to SEQ ID No. 43 which comprises amino acids 18 to 740 of human ACE2 (SEQ ID No. 3) with a S645C mutation, the numbering referring to SEQ ID No. 1, the linking sequence according to SEQ ID No. 4 and the Fc portion of human IgG4 according to SEQ ID No. 5.

[0282] In a particular embodiment, the fusion protein of the present invention has the amino acid sequence according to SEQ ID No. 45 which comprises amino acids 18 to 732 of human ACE2 (SEQ ID No. 2) with a S645C mutation, the numbering referring to SEQ ID No. 1, the linking sequence according to SEQ ID No. 4 and the variant of the Fc portion of human IgG4 according to SEQ ID No. 44.

[0283] In a particular embodiment, the fusion protein of the present invention has the amino acid sequence according to SEQ ID No. 46 which comprises amino acids 18 to 740 of human ACE2 (SEQ ID No. 3) with a S645C mutation, the numbering referring to SEQ ID No. 1, the linking sequence according to SEQ ID No. 4 and the variant of Fc portion of human IgG4 according to SEQ ID No. 44.

[0284] In a particular embodiment, the fusion protein of the present invention has the amino acid sequence according to SEQ ID No. 47 which comprises amino acids 18 to 732 of human ACE2 (SEQ ID No. 2) with a S645C mutation, a H374N mutation and a H378N mutation, the numbering referring to SEQ ID No. 1, the linking sequence according to SEQ ID No. 15 and the Fc portion of human IgG1 according to SEQ ID No. 16.

[0285] In a particular embodiment, the fusion protein of the present invention has the amino acid sequence according to SEQ ID No. 48 which comprises amino acids 18 to 740 of human ACE2 (SEQ ID No. 3) with a S645C mutation, a H374N mutation and a H378N mutation, the numbering referring to SEQ ID No. 1, the linking sequence according to SEQ ID No. 15 and the Fc portion of human IgG1 according to SEQ ID No. 16.

[0286] In a particular embodiment, the fusion protein of the present invention has the amino acid sequence according to SEQ ID No. 49 which comprises amino acids 18 to 732 of human ACE2 (SEQ ID No. 2) with a S645C mutation and a R273A mutation, the numbering referring to SEQ ID No. 1, the linking sequence according to SEQ ID No. 15 and the Fc portion of human IgG1 according to SEQ ID No. 16.

[0287] In a particular embodiment, the fusion protein of the present invention has the amino acid sequence according to SEQ ID No. 50 which comprises amino acids 18 to 740 of human ACE2 (SEQ ID No. 3) with a S645C mutation and a a R273A mutation, the numbering referring to SEQ ID No. 1, the linking sequence according to SEQ ID No. 15 and the Fc portion of human IgG1 according to SEQ ID No. 16.

[0288] In a particular embodiment, the fusion protein of the present invention has the amino acid sequence according to SEQ ID No. 51 which comprises amino acids 18 to 732 of human ACE2 (SEQ ID No. 2) with a S645C mutation, a H374N mutation and a H378N mutation, the numbering referring to SEQ ID No. 1, the linking sequence according to SEQ ID No. 4 and the Fc portion of human IgG4 according to SEQ ID No. 5.

[0289] In a particular embodiment, the fusion protein of the present invention has the amino acid sequence according to SEQ ID No. 52 which comprises amino acids 18 to 740 of human ACE2 (SEQ ID No. 3) with a S645C mutation, a H374N mutation and a H378N mutation, the numbering referring to SEQ ID No. 1, the linking sequence according to SEQ ID No. 4 and the Fc portion of human IgG4 according to SEQ ID No. 5.

[0290] In a particular embodiment, the fusion protein of the present invention has the amino acid sequence according to SEQ ID No. 53 which comprises amino acids 18 to 732 of human ACE2 (SEQ ID No. 2) with a S645C mutation and a R273A mutation, the numbering referring to SEQ ID No. 1, the linking sequence according to SEQ ID No. 4 and the Fc portion of human IgG4 according to SEQ ID No. 5.

[0291] In a particular embodiment, the fusion protein of the present invention has the amino acid sequence according to SEQ ID No. 54 which comprises amino acids 18 to 740 of human ACE2 (SEQ ID No. 3) with a S645C mutation and a a R273A mutation, the numbering referring to SEQ ID No. 1, the linking sequence according to SEQ ID No. 4 and the Fc portion of human IgG4 according to SEQ ID No. 5.

[0292] In a particular embodiment, the fusion protein of the present invention has the amino acid sequence according to SEQ ID No. 55 which comprises amino acids 18 to 732 of human ACE2 (SEQ ID No. 2) with a S645C mutation, a H374N mutation and a H378N mutation, the numbering referring to SEQ ID No. 1, the linking sequence according to SEQ ID No. 4 and the variant of the Fc portion of human IgG4 according to SEQ ID No. 44.

[0293] In a particular embodiment, the fusion protein of the present invention has the amino acid sequence according to SEQ ID No. 56 which comprises amino acids 18 to 740 of human ACE2 (SEQ ID No. 3) with a S645C mutation, a H374N mutation and a H378N mutation, the numbering referring to SEQ ID No. 1, the linking sequence according to SEQ ID No. 4 and the variant of the Fc portion of human IgG4 according to SEQ ID No. 44.

[0294] In a particular embodiment, the fusion protein of the present invention has the amino acid sequence according to SEQ ID No. 57 which comprises amino acids 18 to 732 of human ACE2 (SEQ ID No. 2) with a S645C mutation and a R273A mutation, the numbering referring to SEQ ID No. 1, the linking sequence according to SEQ ID No. 4 and the variant of the Fc portion of human IgG4 according to SEQ ID No. 44.

[0295] In a particular embodiment, the fusion protein of the present invention has the amino acid sequence according to SEQ ID No. 58 which comprises amino acids 18 to 740 of human ACE2 (SEQ ID No. 3) with a S645C mutation and a a R273A mutation, the numbering referring to SEQ ID No. 1, the linking sequence according to SEQ ID No. 4 and the variant of the Fc portion of human IgG4 according to SEQ ID No. 44.

[0296] In a particular embodiment, the fusion protein of the present invention has the amino acid sequence according to SEQ ID No. 61 which comprises amino acids 18 to 732 of human ACE2 (SEQ ID No. 2) with a S645C mutation, the numbering referring to SEQ ID No. 1, the linking sequence according to SEQ ID No. 15 and the variant of the Fc portion of human IgG1 according to SEQ ID No. 59.

[0297] In a particular embodiment, the fusion protein of the present invention has the amino acid sequence according to SEQ ID No. 62 which comprises amino acids 18 to 740 of human ACE2 (SEQ ID No. 3) with a S645C mutation, the numbering referring to SEQ ID No. 1, the linking sequence according to SEQ ID No. 15 and the variant of the Fc portion of human IgG1 according to SEQ ID No. 59.

[0298] In a particular embodiment, the fusion protein of the present invention has the amino acid sequence according to SEQ ID No. 63 which comprises amino acids 18 to 732 of human ACE2 (SEQ ID No. 2) with a S645C mutation, a H374N mutation and a H378N mutation, the numbering referring to SEQ ID No. 1, the linking sequence according to SEQ ID No. 15 and the variant of the Fc portion of human IgG1 according to SEQ ID No. 59.

[0299] In a particular embodiment, the fusion protein of the present invention has the amino acid sequence according to SEQ ID No. 64 which comprises amino acids 18 to 740 of human ACE2 (SEQ ID No. 3) with a S645C mutation, a H374N mutation and a H378N mutation, the numbering referring to SEQ ID No. 1, the linking sequence according to SEQ ID No. 15 and the variant of the Fc portion of human IgG1 according to SEQ ID No. 59.

[0300] In a particular embodiment, the fusion protein of the present invention has the amino acid sequence according to SEQ ID No. 65 which comprises amino acids 18 to 732 of human ACE2 (SEQ ID No. 2) with a S645C mutation and a R273A mutation, the numbering referring to SEQ ID No. 1, the linking sequence according to SEQ ID No. 15 and the variant of the Fc portion of human IgG1 according to SEQ ID No. 59.

[0301] In a particular embodiment, the fusion protein of the present invention has the amino acid sequence according to SEQ ID No. 66 which comprises amino acids 18 to 740 of human ACE2 (SEQ ID No. 3) with a S645C mutation and a R273A mutation, the numbering referring to SEQ ID No. 1, the linking sequence according to SEQ ID No. 15 and the variant of the Fc portion of human IgG1 according to SEQ ID No. 59.

[0302] In a particular embodiment, the fusion protein of the present invention has the amino acid sequence according to SEQ ID No. 67 which comprises amino acids 18 to 732 of human ACE2 (SEQ ID No. 2) with a S645C mutation, the numbering referring to SEQ ID No. 1, the linking sequence according to SEQ ID No. 4 and the variant of the Fc portion of human IgG4 according to SEQ ID No. 60.

[0303] In a particular embodiment, the fusion protein of the present invention has the amino acid sequence according to SEQ ID No. 68 which comprises amino acids 18 to 740 of human ACE2 (SEQ ID No. 3) with a S645C mutation, the numbering referring to SEQ ID No. 1, the linking sequence according to SEQ ID No. 4 and the variant of the Fc portion of human IgG4 according to SEQ ID No. 60.

[0304] In a particular embodiment, the fusion protein of the present invention has the amino acid sequence according to SEQ ID No. 69 which comprises amino acids 18 to 732 of human ACE2 (SEQ ID No. 2) with a S645C mutation, a H374N mutation and a H378N mutation, the numbering referring to SEQ ID No. 1, the linking sequence according to SEQ ID No. 4 and the variant of the Fc portion of human IgG4 according to SEQ ID No. 60.

[0305] In a particular embodiment, the fusion protein of the present invention has the amino acid sequence according to SEQ ID No. 70 which comprises amino acids 18 to 740 of human ACE2 (SEQ ID No. 3) with a S645C mutation, a H374N mutation and a H378N mutation, the numbering referring to SEQ ID No. 1, the linking sequence according to SEQ ID No. 4 and the variant of the Fc portion of human IgG4 according to SEQ ID No. 60.

[0306] In a particular embodiment, the fusion protein of the present invention has the amino acid sequence according to SEQ ID No. 71 which comprises amino acids 18 to 732 of human ACE2 (SEQ ID No. 2) with a S645C mutation and a R273A mutation, the numbering referring to SEQ ID No. 1, the linking sequence according to SEQ ID No. 4 and the variant of the Fc portion of human IgG4 according to SEQ ID No. 60.

[0307] In a particular embodiment, the fusion protein of the present invention has the amino acid sequence according to SEQ ID No. 72 which comprises amino acids 18 to 740 of human ACE2 (SEQ ID No. 3) with a S645C mutation and a a R273A mutation, the numbering referring to SEQ ID No. 1, the linking sequence according to SEQ ID No. 4 and the variant of the Fc portion of human IgG4 according to SEQ ID No. 60.

[0308] In a particular embodiment, the fusion protein of the present invention has the amino acid sequence according to SEQ ID No. 73 which comprises amino acids 18 to 732 of human ACE2 (SEQ ID No. 2), the linking sequence according to SEQ ID No. 15 and the variant of the Fc portion of human IgG1 according to SEQ ID No. 59.

[0309] In a particular embodiment, the fusion protein of the present invention has the amino acid sequence according to SEQ ID No. 74 which comprises amino acids 18 to 740 of human ACE2 (SEQ ID No. 3), the linking sequence according to SEQ ID No. 15 and the variant of the Fc portion of human IgG1 according to SEQ ID No. 59.

[0310] In a particular embodiment, the fusion protein of the present invention has the amino acid sequence according to SEQ ID No. 75 which comprises amino acids 18 to 732 of human ACE2 (SEQ ID No. 2), the linking sequence according to SEQ ID No. 4 and the variant of the Fc portion of human IgG4 according to SEQ ID No. 60.

[0311] In a particular embodiment, the fusion protein of the present invention has the amino acid sequence according to SEQ ID No. 76 which comprises amino acids 18 to 740 of human ACE2 (SEQ ID No. 3), the linking sequence according to SEQ ID No. 4 and the variant of the Fc portion of human IgG4 according to SEQ ID No. 60.

[0312] In a particular embodiment, the fusion protein of the present invention has the amino acid sequence according to SEQ ID No. 77 which comprises amino acids 18 to 732 of human ACE2 (SEQ ID No. 2) with a H374N and H378N mutation, the numbering referring to SEQ ID No. 1, the linking sequence according to SEQ ID No. 15 and the variant of the Fc portion of human IgG1 according to SEQ ID No. 59.

[0313] In a particular embodiment, the fusion protein of the present invention has the amino acid sequence according to SEQ ID No. 78 which comprises amino acids 18 to 740 of human ACE2 (SEQ ID No. 3) with a H374N and H378N mutation, the numbering referring to SEQ ID No. 1, the linking sequence according to SEQ ID No. 15 and the variant of the Fc portion of human IgG1 according to SEQ ID No. 59.

[0314] In a particular embodiment, the fusion protein of the present invention has the amino acid sequence according to SEQ ID No. 79 which comprises amino acids 18 to 732 of human ACE2 (SEQ ID No. 2) with a H374N and H378N mutation, the numbering referring to SEQ ID No. 1, the linking sequence according to SEQ ID No. 4 and the variant of the Fc portion of human IgG4 according to SEQ ID No. 60.

[0315] In a particular embodiment, the fusion protein of the present invention has the amino acid sequence according to SEQ ID No. 80 which comprises amino acids 18 to 740 of human ACE2 (SEQ ID No. 3) with a H374N and H378N mutation, the numbering referring to SEQ ID No. 1, the linking sequence according to SEQ ID No. 4 and the variant of the Fc portion of human IgG4 according to SEQ ID No. 60.

[0316] In a particular embodiment, the fusion protein of the present invention has the amino acid sequence according to SEQ ID No. 81 which comprises amino acids 18 to 732 of human ACE2 (SEQ ID No. 2) with a R273A mutation, the numbering referring to SEQ ID No. 1, the linking sequence according to SEQ ID No. 15 and the variant of the Fc portion of human IgG1 according to SEQ ID No. 59.

[0317] In a particular embodiment, the fusion protein of the present invention has the amino acid sequence according to SEQ ID No. 82 which comprises amino acids 18 to 740 of human ACE2 (SEQ ID No. 3) with a R273A mutation, the numbering referring to SEQ ID No. 1, the linking sequence according to SEQ ID No. 15 and the variant of the Fc portion of human IgG1 according to SEQ ID No. 59.

[0318] In a particular embodiment, the fusion protein of the present invention has the amino acid sequence according to SEQ ID No. 83 which comprises amino acids 18 to 732 of human ACE2 (SEQ ID No. 2) with a R273A mutation, the numbering referring to SEQ ID No. 1, the linking sequence according to SEQ ID No. 4 and the variant of the Fc portion of human IgG4 according to SEQ ID No. 60.

[0319] In a particular embodiment, the fusion protein of the present invention has the amino acid sequence according to SEQ ID No. 84 which comprises amino acids 18 to 740 of human ACE2 (SEQ ID No. 3) with a R273A mutation, the numbering referring to SEQ ID No. 1, the linking sequence according to SEQ ID No. 4 and the variant of the Fc portion of human IgG4 according to SEQ ID No. 60.

[0320] In a particular embodiment, the fusion protein of the present invention has the amino acid sequence according to SEQ ID No. 85 which comprises amino acids 18 to 732 of human ACE2 (SEQ ID No. 2) with a R273A mutation, the numbering referring to SEQ ID No. 1, the linking sequence according to SEQ ID No. 15 and the Fc portion of human IgG1 according to SEQ ID No. 16.

[0321] In a particular embodiment, the fusion protein of the present invention has the amino acid sequence according to SEQ ID No. 86 which comprises amino acids 18 to 740 of human ACE2 (SEQ ID No. 3) with a R273A mutation, the numbering referring to SEQ ID No. 1, the linking sequence according to SEQ ID No. 15 and the Fc portion of human IgG1 according to SEQ ID No. 16.

[0322] In a particular embodiment, the fusion protein of the present invention has the amino acid sequence according to SEQ ID No. 87 which comprises amino acids 18 to 732 of human ACE2 (SEQ ID No. 2) with a R273A mutation, the numbering referring to SEQ ID No. 1, the linking sequence according to SEQ ID No. 4 and the Fc portion of human IgG4 according to SEQ ID No. 5.

[0323] In a particular embodiment, the fusion protein of the present invention has the amino acid sequence according to SEQ ID No. 88 which comprises amino acids 18 to 740 of human ACE2 (SEQ ID No. 3) with a R273A mutation, the numbering referring to SEQ ID No. 1, the linking sequence according to SEQ ID No. SEQ ID No. 4 and the Fc portion of human IgG4 according to SEQ ID No. 5.

[0324] In a particular embodiment, the fusion protein of the present invention has the amino acid sequence according to SEQ ID No. 89 which comprises amino acids 18 to 732 of human ACE2 (SEQ ID No. 2) with a R273A mutation, the numbering referring to SEQ ID No. 1, the linking sequence according to SEQ ID No. 4 and the variant of the Fc portion of human IgG4 according to SEQ ID No. 44.

[0325] In a particular embodiment, the fusion protein of the present invention has the amino acid sequence according to SEQ ID No. 90 which comprises amino acids 18 to 740 of human ACE2 (SEQ ID No. 3) with a R273A mutation, the numbering referring to SEQ ID No. 1, the linking sequence according to SEQ ID No. SEQ ID No. 4 and the variant of the Fc portion of human IgG4 according to SEQ ID No. 44.

[0326] In a particular embodiment, the fusion protein of the present invention has the amino acid sequence according to SEQ ID No. 93 which comprises amino acids 18 to 732 of human ACE2 (SEQ ID No. 2), the numbering referring to SEQ ID No. 1, the linking sequence according to SEQ ID No. 4 and the variant of the Fc portion of human IgG4 according to SEQ ID No. 44.

[0327] In a particular embodiment, the fusion protein of the present invention has the amino acid sequence according to SEQ ID No. 94 which comprises amino acids 18 to 740 of human ACE2 (SEQ ID No. 3), the numbering referring to SEQ ID No. 1, the linking sequence according to SEQ ID No. SEQ ID No. 4 and the variant of the Fc portion of human IgG4 according to SEQ ID No. 44.

[0328] The present invention also relates to a nucleic acid molecule comprising a nucleic acid sequence encoding the fusion protein of the present invention. The skilled person knows how to construct a nucleic acid molecule when the amino acid sequence of a protein is known. In particular, the construction of the nucleic acid molecule involves back-translating the amino acid sequence of the protein into a nucleic acid sequence using the three-letter genetic code and optionally taking into account the codon usage of the host cell in which the protein is to be expressed using the nucleic acid molecule.

[0329] In one embodiment, the nucleic acid molecule comprising a nucleic acid sequence encoding the fusion protein of the present invention is an isolated nucleic acid molecule. The term “isolated nucleic acid molecule” refers to a nucleic acid molecule that is identified and separated from at least one contaminant nucleic acid molecule with which it is ordinarily associated in the environment in which it was produced. Preferably, the isolated nucleic acid is free of association with all components associated with the production environment.

[0330] The term “vector,” as used herein, refers to a nucleic acid molecule capable of propagating another nucleic acid to which it is linked. The term includes the vector as a self- replicating nucleic acid structure as well as the vector incorporated into the genome of a host cell into which it has been introduced. Certain vectors are capable of directing the expression of nucleic acids to which they are operatively linked. Such vectors are referred to herein as “expression vectors.”

[0331] Expression vectors contain elements for the expression of the nucleic acids such as suitable promoters and polyadenylation signals. In addition, the expression vectors typically contain a selection marker gene under the control of suitable promoter to enable the distinction of cells which contain the expression vector from cells which do not contain the expression vector. The elements and methods needed to construct expression vectors which are suitable for expressing a recombinant protein such as the fusion protein of the present invention are well-known to the skilled person and described for example in Makrides et al. (1999) Protein Expr. Purif. 17: 183-202 and Kaufman (2000) Mol. Biotechnol. 16: 151-161.

[0332] The expression vector is used to transform, i.e. genetically modify, suitable host cells. The skilled person is aware of methods for introducing the expression vectors into the mammalian cells. These methods include the use of commercially available transfection kits such as Lipofectamine® of ThermoFisher, PElmax of Polyplus Sciences), 293-Free transfection reagent (Millipore) or Freestyle Max of Invitrogen. Further suitable methods include electroporation, calcium phosphate-mediated transfection and DEAE-dextrane transfection. After transfection the cells are subjected to selection by treatment with a suitable agent based on the selection marker(s) encoded by the expression vector(s) to identify the stably transfected cells which contain the recombinant nucleic acid molecule.

[0333] The terms “host cell,” “host cell line,” and “host cell culture” are used interchangeably and refer to cells into which an exogenous nucleic acid or an expression vector has been introduced, including the progeny of such cells. Host cells include “transformants” and “transformed cells,” which include the primary transformed cell and progeny derived therefrom without regard to the number of passages.

[0334] The fusion protein of the present invention is preferably produced in mammalian host cells. Suitable mammalian host cells for expressing the fusion protein of the invention include Chinese Hamster Ovary (CHO) cells (including dhfr negative CHO cells used with a DHFR selectable marker), NS0 myeloma cells, COS cells, SP2 cells, monkey kidney CV1, human embryonic kidney line 293, baby hamster kidney cells (BHK), mouse Sertoli cells (TM4), African green monkey kidney cells (VERO-76), human cervical carcinoma cells (HELA), canine kidney cells (MDC), buffalo rat liver cells (BRL 3 A), human lung cells (W138), human liver cells (Hep G2), mouse mammary tumor cells (MMT 060562), TRI cells, MRC 5 cells and FS4 cells. More preferably, the host cells are derived from a rodent. Most preferably, the mammalian cells are Chinese hamster ovary (CHO) cells.

[0335] To produce the fusion protein of the present invention, the host cells are cultured in a suitable culture medium.

[0336] The terms “medium”, “cell culture medium” and “culture medium” are interchangeably used herein and refer to a solution containing nutrients which are required for growing mammalian cells. Typically, a cell culture medium provides essential and non-essential amino acids, vitamins, energy sources, lipids, and trace elements required by the cell for minimal growth and/or survival. The cell culture medium may also comprise growth factors. Preferably, the medium is chemically defined in that all its components and their concentration are known. Also preferably, the medium is serum-free and hydrolysate-free and does not contain any components derived from animals. In a more preferred embodiment the medium is serum-free and hydrolysate-free and does not contain any components derived from animals or insulin.

[0337] In one embodiment the medium used in the method of the present invention is a commercially available medium such as FreeStyle 293 expression medium (Life Technologies), PolCHO P Powder Base CD, ActiPro (both available from GE), PowerCHO-2, ProCHO-5 (both available from Lonza) or EX-CELL® Advanced CHO fed batch medium (available from Sigma).

[0338] For culturing the mammalian cells different strategies are available, including batch culture, perfusion culture, continuous culture and fed-batch culture. Preferably, a fed-batch culture process is used. In fed-batch culture the culturing process is started with a certain volume of the basal medium and one or more feed media comprising one or more nutrients are fed at later time-point(s) of the culture process to prevent nutrient depletion while no product is removed from the cell culture broth. Accordingly, the term “feeding” means that at least one component is added to an existing culture of cells.

[0339] The term “basal medium” is intended to refer to the medium which is used from the beginning of the cell culture process. The mammalian cells are inoculated into the basal medium and grown in this medium for a certain period until the feeding is started. The basal medium meets the definition of the culture medium as provided above. If a commercially available medium is used, additional components may be added to the basal medium.

[0340] The feed medium is added to the cell culture after the cells have been cultured in the basal medium for a certain period. The feed medium serves to prevent nutrient depletion and therefore may not have the same composition as the basal medium. In particular, the concentration of one or more nutrients may be higher in the feed medium than in the basal medium. In one embodiment, the feed medium has the same composition as the basal medium. In another embodiment, the feed medium has another composition as the basal medium. The feed medium may be added continuously or as a bolus at defined time points.

[0341] Suitable feed media are known to the skilled person and include PolCHO Feed-A Powder Base CD, PolCHO Feed-B Powder Base CD, Cell Boost 7a and Cell Boost 7b (all available from GE), BalanCD® CHO Feed 3 Medium (available from Irvine Scientific) and EX-CELL® Advanced CHO feed 1 (available from Sigma).

[0342] The culturing of the host cell may be performed at a constant temperature, e.g. at a temperature of 37° C.±0.2° C. Alternatively, the culture temperature may be reduced from a first temperature to a second temperature, i.e. the temperature is actively downregulated. Hence, the second temperature is lower than the first temperature. The first temperature may be 37° C.±0.2° C. The second temperature may be in the range of from 30° C. to 36° C.

[0343] After the fusion protein of the present invention has been produced by culturing the host cell in a suitable culture medium, the fusion protein is harvested from the cell culture. Since Fc fusion proteins expressed from mammalian cells are typically secreted into the cell culture fluid during the cultivation process, the product harvest at the end of the cultivation process occurs by separating cell culture fluid comprising the fusion protein from the cells. The cell separation method should be gentle to minimize cell disruption to avoid the increase of cell debris and release of proteases and other molecules that could affect the quality of the fusion protein product. Usually, the harvesting of the cell culture fluid comprising the fusion protein involves centrifugation and/or filtration, whereby the fusion protein is present in the supernatant and the filtrate, respectively. Expanded bed adsorption chromatography is an alternative method to avoid centrifugation/filtration methods.

[0344] After harvesting the cell culture fluid comprising the fusion protein the fusion protein has to be purified from the cell culture fluid. The purification of Fc fusion proteins is usually accomplished by a series of standard techniques that can include chromatographic steps such as anion exchange chromatography, cation exchange chromatography, affinity chromatography and in particular protein A affinity chromatography, hydrophobic interaction chromatography, hydroxyapatite chromatography and size exclusion chromatography. Further, the purification process may comprise one or more ultra-, nano- or diafiltration as well as tangential flow filtration and/or cross flow filtration steps.

[0345] After purifying the fusion protein it can be used to prepare a pharmaceutical composition. A pharmaceutical composition is a composition which is intended to be delivered to a patient for treating or preventing a disease or condition. In addition to the active agent, i.e. the fusion protein of the present invention, a pharmaceutical composition typically contains at least one pharmaceutically acceptable excipient. Pharmaceutically acceptable excipients are substances which do not interfere with the physiological activity of the fusion protein and which stabilize the pharmaceutical composition and/or enhance solubility or decrease viscosity of the pharmaceutical composition. Typical pharmaceutically acceptable excipients for recombinant proteins include buffers, salts, sugars or sugar alcohols, amino acids and surface-active agents.

[0346] The pharmaceutical composition comprises a therapeutically effective amount of the fusion protein of the present invention. The term “therapeutically effective amount” refers to an amount of the fusion protein of the present invention sufficient to treat a specified disorder, condition or disease such as ameliorate, palliate, lessen, and/or delay one or more of its symptoms. With respect to an infection with a coronavirus and in particular SARS-CoV-2 the therapeutically effective amount of the fusion protein of the present invention ameliorates, palliates, lessens, and/or delays one or more of symptoms selected from coughing, shortness of breath, difficulty breathing, fever, chills, tiredness, muscle aches, sore throat, headache, chest pain and loss of smell and/or taste. A therapeutically effective amount can be administered in one or more administrations.

[0347] The fusion protein of the present invention is for medical use, i.e. it is intended to be used to prevent and/or treat a disease.

[0348] As used herein,“treatment” or“treating” is an approach for obtaining beneficial or desired results including clinical results. For purposes of this invention, beneficial or desired clinical results include, but are not limited to, one or more of the following: alleviating one or more symptoms resulting from the disease, diminishing the extent of the disease, stabilizing the disease (e.g., preventing or delaying the worsening of the disease), preventing or delaying the spread of the disease, preventing or delaying the recurrence of the disease, delaying or slowing the progression of the disease, ameliorating the disease state, providing a remission (partial or total) of the disease, decreasing the dose of one or more other medications required to treat the disease, and/or prolonging survival. The use of the present invention contemplates any one or more of these aspects of treatment.

[0349] The term “prevent,” and similar words such as “prevented”, “preventing” etc., indicate an approach for preventing, inhibiting, or reducing the likelihood of the recurrence of, a disease or condition. It also refers to delaying the recurrence of a disease or condition or delaying the recurrence of the symptoms of a disease or condition. As used herein, “prevention” and similar terms also includes reducing the intensity, effect, symptoms and/or burden of a disease or condition prior to recurrence of the disease or condition.

[0350] In one embodiment, the fusion protein of the present invention is used to prevent and/or treat an infection with a coronavirus binding to ACE2. Coronaviruses are enveloped viruses with a positive sense, single-stranded RNA genome and an icosahedral protein shell. The Spike protein consisting of the S1 and S2 subunits forms a homotrimer which projects from the envelope and mediates the interaction with the target cells by binding to ACE2. Coronaviruses often cause respiratory diseases in humans and other mammalian as well as bird species. In humans, seven coronavirus strains are known: HCoV-OC43, HCoV-HKU1, HCoV-229E, HCoV-NL63, MERS-CoV, SARS-CoV and SARS-CoV-2. The first four coronavirus strains (HCoV-OC43, HCoV-HKU1, HCoV-229E, HCoV-NL63) cause only mild symptoms, whereas infection with MERS-CoV, SARS-CoV and SARS-CoV-2 may lead to severe, potentially life-threatening disease.

[0351] It has been shown that SARS-CoV, SARS-CoV-2 and HCoV-NL63 bind to ACE2 and use this binding to enter the target cells (Li et al. (2003) Nature 426(6965): 450-4; Hoffmann et al. (2020) Cell 181: 1-10; Hofmann et al. (2005) Proc Natl Acad Sci USA. 102(22):7988-93). Accordingly, the fusion protein of the present invention can be used to treat and/or prevent infection with a coronavirus binding to ACE2, in particular infection with SARS-CoV, SARS-CoV-2 or HCoV-NL63. Further coronaviruses binding to ACE2 can be identified by inoculating cells expressing ACE2 either transiently or constitutively with pseudotyped VSV (vesicular stomatitis virus) expressing the coronavirus Spike protein and a reporter protein and detecting the activity of the reporter protein after the inoculation period (see protocol in Hoffmann et al. (2020) Cell 181: 1-10). In one embodiment, the fusion protein of the present invention is used to treat and/or prevent infection with a coronavirus binding to ACE2, wherein the coronavirus binding to ACE2 is not SARS-CoV.

[0352] In one embodiment, the fusion protein of the present invention is used to treat and/or prevent infection with a coronavirus binding to ACE2, wherein the coronavirus binding to ACE2 is SARS-CoV-2 or a variant of SARS-CoV-2 comprising the amino acid substitution D614G and/or the amino acid substitution N439K. The variant of SARS-CoV-2 comprising the amino acid substitution D614G is described in Korber et al. (2020) Cell 182(4): 812-827 and the amino acid substitution N439K is described in Thomson et al. (2021) Cell 184(5): 1171,1187.e20; available at https://doi.org/10.1101/2020.11.04.355842. In one embodiment, the fusion protein of the present invention is used to treat and/or prevent infection with a coronavirus binding to ACE2, wherein the coronavirus binding to ACE2 is a variant of SARS-CoV-2 comprising the amino acid substitution D614G. The amino acid substitution D614G is caused by an A-to-G nucleotide mutation at position 23,403 in the Wuhan reference strain. The numbering of the amino acids in the variants refers to the numbering in the Spike protein of SARS-CoV-2 according to SEQ ID No. 18. Hence, a SARS-CoV-2 virus with the Spike protein according to SEQ ID No. 18 is defined to be the wild-type SARS-CoV-2 from which any variants are derived.

[0353] In one embodiment, the fusion protein of the present invention is used to treat and/or prevent infection with a coronavirus binding to ACE2, wherein the coronavirus binding to ACE2 is a variant of SARS-CoV-2 comprising the amino acid substitution D614G and at least one additional amino acid substitution. In one embodiment, the fusion protein of the present invention is used to treat and/or prevent infection with a coronavirus binding to ACE2, wherein the coronavirus binding to ACE2 is a variant of SARS-CoV-2 comprising the amino acid substitutions D614G, N501Y, A570D, P681H, T7161, S982A and D1118H and comprising a deletion of amino acids 69, 70 and 145. In one embodiment, the fusion protein of the present invention is used to treat and/or prevent infection with a coronavirus binding to ACE2, wherein the coronavirus binding to ACE2 is a variant of SARS-CoV-2 comprising the amino acid substitutions D614G, Y453F, 1692V and M1229I and comprising a deletion of amino acids 69 and 70. In one embodiment, the fusion protein of the present invention is used to treat and/or prevent infection with a coronavirus binding to ACE2, wherein the coronavirus binding to ACE2 is a variant of SARS-CoV-2 comprising the amino acid substitutions D614G, S131, W152C and L452R. In one embodiment, the fusion protein of the present invention is used to treat and/or prevent infection with a coronavirus binding to ACE2, wherein the coronavirus binding to ACE2 is a variant of SARS-CoV-2 comprising the amino acid substitutions D614G, E484K and V1176F. In one embodiment, the fusion protein of the present invention is used to treat and/or prevent infection with a coronavirus binding to ACE2, wherein the coronavirus binding to ACE2 is a variant of SARS-CoV-2 comprising the amino acid substitutions D614G, L18F, T20N, P26S, D138Y, R190S, K417T, E484K, N501Y, H655Y, T1027I and V1176F. In one embodiment, the fusion protein of the present invention is used to treat and/or prevent infection with a coronavirus binding to ACE2, wherein the coronavirus binding to ACE2 is a variant of SARS-CoV-2 comprising the amino acid substitutions D614G, D80A, D215G, K417N, E484K, N501Y and A701V and comprising a deletion of amino acids 242, 243 and 244. In one embodiment, the fusion protein of the present invention is used to treat and/or prevent infection with a coronavirus binding to ACE2, wherein the coronavirus binding to ACE2 is a variant of SARS-CoV-2 comprising the amino acid substitutions D614G, L18F, D80A, D215G, K417N, E484K, N501Y and A701V and comprising a deletion of amino acids 242, 243 and 244. In one embodiment, the fusion protein of the present invention is used to treat and/or prevent infection with a coronavirus binding to ACE2, wherein the coronavirus binding to ACE2 is a variant of SARS-CoV-2 comprising the amino acid substitutions D614G, D80A, R246I, K417N, E484K, N501Y and A701V and comprising a deletion of amino acids 242, 243 and 244. In one embodiment, the fusion protein of the present invention is used to treat and/or prevent infection with a coronavirus binding to ACE2, wherein the coronavirus binding to ACE2 is a variant of SARS-CoV-2 comprising the amino acid substitutions E484Q and L452R. In one embodiment, the fusion protein of the present invention is used to treat and/or prevent infection with a coronavirus binding to ACE2, wherein the coronavirus binding to ACE2 is a variant of SARS-CoV-2 comprising the amino acid substitutions E484K and D614G and comprising a deletion of amino acids 145 and 146.

[0354] The numbering of the amino acids in the variants refers to the numbering in the Spike protein of SARS-CoV-2 according to SEQ ID No. 18. For the purposes of defining variants, the amino acid sequence according to SEQ ID NO. 18 is considered to be the wild-type sequence of the Spike protein of SARS-CoV-2.

[0355] In one embodiment, the fusion protein of the present invention is used to treat and/or prevent infection with a coronavirus binding to ACE2, wherein the coronavirus binding to ACE2 is a variant of SARS-CoV-2 comprising one or more amino acid substitutions in the receptor-binding domain of the Spike protein of SARS-CoV-2. The receptor-binding domain of the Spike protein of SARS-CoV-2 comprises amino acids 331 to 524 of SEQ ID No. 18 (see Tai et al. (2020) Cell. Mol. Immunol. 17: 613-620). In one embodiment, the fusion protein of the present invention is used to treat and/or prevent infection with a coronavirus binding to ACE2, wherein the coronavirus binding to ACE2 is a variant of SARS-CoV-2 comprising the amino acid substitution N501Y. In one embodiment, the fusion protein of the present invention is used to treat and/or prevent infection with a coronavirus binding to ACE2, wherein the coronavirus binding to ACE2 is a variant of SARS-CoV-2 comprising the amino acid substitution E484K. In one embodiment, the fusion protein of the present invention is used to treat and/or prevent infection with a coronavirus binding to ACE2, wherein the coronavirus binding to ACE2 is a variant of SARS-CoV-2 comprising the amino acid substitution K417T/N.

[0356] In one embodiment, the fusion protein of the present invention is used to treat and/or prevent infection with a coronavirus binding to ACE2, wherein the coronavirus binding to ACE2 is a variant of SARS-CoV-2 which has a higher binding affinity to ACE2 compared to the SARS-CoV-2 comprising the wild-type Spike protein according to SEQ ID No. 18. The affinity of a variant of SARS-CoV-2 to ACE2 can for example be determined using a pseudovirus assay. The pseudovirus assay uses a lentivirus which is pseudotyped with the S protein of wild-type SARS-CoV-2 or of a variant thereof and which contains a reporter gene such as the luciferase gene. Such lentiviruses can be obtained for example from BPS Bioscience. The pseudotyped lentivirus is incubated with ACE2 expressing cells to allow the virus to enter the cells and to express the reporter gene. If the expression of the reporter gene from a lentivirus pseudotyped with the S protein of a variant SARS-CoV-2 is higher than the expression of the reporter gene from a lentivirus pseudotyped with the S protein of wild-type SARS-CoV-2, the variant has a higher binding affinity to ACE2. In the context of the present invention it has been found that the fusion proteins of the present invention have a higher affinity to those variants which have a higher binding affinity to ACE2, such as the variant B.1.1.7.

[0357] In one embodiment, the fusion protein of the present invention is used to treat and/or prevent infection with a coronavirus binding to ACE2, wherein the coronavirus binding to ACE2 is a variant of SARS-CoV-2 which has a higher transmissibility compared to the SARS-CoV-2 comprising the wild-type Spike protein according to SEQ ID No. 18. The viral transmissibility can be determined using the basic reproduction number R₀ which is the average number of people who will catch a disease from one contagious person.

[0358] The route of administration is in accordance with known and accepted methods, e.g., injection or infusion by subcutaneous, intravenous, intraperitoneal, intramuscular, intra-arterial, intralesional or intraarticular routes. In another embodiment the fusion protein of the present invention is to be administered intranasally, e.g. by means of a nasal spray, a nasal ointment or nasal drops. In another embodiment, the fusion protein of the present invention is administered by topical administration or by inhalation. Preferably, the fusion protein of the present invention is administered by intravenous injection or infusion.

[0359] Dosages and desired drug concentrations of pharmaceutical compositions of the present invention may vary depending on the particular use envisioned. The determination of the appropriate dosage or route of administration is well within the skill of an ordinary artisan. Animal experiments provide reliable guidance for the determination of effective doses for human therapy. Interspecies scaling of effective doses can be performed following the principles laid down by Mordenti, J. and Chappell, W. “The Use of Interspecies Scaling in Toxicokinetics,” In Toxicokinetics and New Drug Development, Yacobi et al., Eds, Pergamon Press, New York 1989, pp.42-46.

[0360] In one embodiment, the fusion protein of the present invention is administered intravenously at a dosage of 0.1 mg/kg body weight to 4 mg/kg body weight, such as a dosage of 0.1 mg/kg body weight, 0.2 mg/kg body weight, 0.3 mg/kg body weight, 0.4 mg/kg body weight, 0.5 mg/kg body weight, 0.6 mg/kg body weight, 0.7 mg/kg body weight, 0.8 mg/kg body weight, 0.9 mg/kg body weight, 1.0 mg/kg body weight, 1.1 mg/kg body weight, 1.2 mg/kg body weight, 1.3 mg/kg body weight, 1.4 mg/kg body weight, 1.5 mg/kg body weight, 1.6 mg/kg body weight, 1.7 mg/kg body weight, 1.8 mg/kg body weight, 1.9 mg/kg body weight, 2.0 mg/kg body weight, 2.1 mg/kg body weight, 2.2 mg/kg body weight, 2.3 mg/kg body weight, 2.4 mg/kg body weight, 2.5 mg/kg body weight, 2.6 mg/kg body weight, 2.7 mg/kg body weight, 2.8 mg/kg body weight, 2.9 mg/kg body weight, 3.0 mg/kg body weight, 3.1 mg/kg body weight, 3.2 mg/kg body weight, 3.3 mg/kg body weight, 3.4 mg/kg body weight, 3.5 mg/kg body weight, 3.6 mg/kg body weight, 3.7 mg/kg body weight, 3.8 mg/kg body weight, 3.9 mg/kg body weight or 4.0 mg/kg body weight.

[0361] In one embodiment, the fusion protein of the present invention is administered intravenously at a dosage of 10 mg/kg body weight to 150 mg/kg body weight, such as a dosage of 10 mg/kg body weight, 15 mg/kg body weight, 20 mg/kg body weight, 25 mg/kg body weight, 30 mg/kg body weight, 35 mg/kg body weight, 40 mg/kg body weight, 45 mg/kg body weight, 50 mg/kg body weight, 55 mg/kg body weight, 60 mg/kg body weight, 65 mg/kg body weight, 70 mg/kg body weight, 75 mg/kg body weight, 80 mg/kg body weight, 85 mg/kg body weight, 90 mg/kg body weight, 95 mg/kg body weight, 100 mg/kg body weight, 105 mg/kg body weight, 110 mg/kg body weight, 115 mg/kg body weight, 120 mg/kg body weight, 125 mg/kg body weight, 130 mg/kg body weight, 135 mg/kg body weight, 140 mg/kg body weight, 145 mg/kg body weight or 150 mg/kg body weight.

[0362] The fusion protein may be administered once per day, twice per day, three times per day, every other day, once per week or once every two weeks.

[0363] The fusion protein may be administered for a period of three days, four days, five days, six days, seven days, eight days, nine days or ten days.

[0364] By administering the fusion protein of the present invention, the infection with a coronavirus and in particular with SARS-CoV-2 is treated, i.e. at least one of the symptoms of an infection with SARS-CoV-2 is reduced or abolished. Symptoms of an infection with SARS-CoV-2 include coughing, shortness of breath, difficulty breathing, fever, chills, tiredness, muscle aches, sore throat, headache, chest pain and loss of smell and/or taste. In one embodiment, by the administration of the fusion protein of the present invention the fever caused by infection with SARS-CoV-2 is reduced. In one embodiment, the administration of the fusion protein of the present invention to a subject reduces the risk that the subject experiences a severe course of infection with SARS-CoV-2. In one embodiment, the administration of the fusion protein of the present invention to a subject reduces the risk that the subject experiences multi-organ failure, acute respiratory distress syndrome (ARDS) or pneumonia. In one embodiment, the administration of the fusion protein of the present invention to a subject reduces the risk that the subject experiences long-term effects of the infection with SARS-CoV-2 such as lung damage, neurological disorders, dermatological disorders and cardiovascular disease. In one embodiment, the administration of the fusion protein of the present invention to a subject reduces the concentration of the cytokines IL6 and/or IL8 in the blood. In one embodiment, the administration of the fusion protein of the present invention to a subject reduces the concentration of SARS-CoV-2 virus particles in the blood. In one embodiment, the administration of the fusion protein of the present invention to a subject stimulates the production of antiviral antibodies. In one embodiment, the administration of the fusion protein of the present invention to a subject stimulates the production of antiviral IgA and/or IgG antibodies.

[0365] In one embodiment, the fusion protein of the present invention is administered to a subject suffering from a severe infection with SARS-CoV-2. In one embodiment, the fusion protein of the present invention is administered to a subject infected with SARS-CoV-2 and requiring artificial ventilation. In one embodiment, the fusion protein of the present invention is administered to a subject infected with SARS-CoV-2 and requiring extracorporeal membrane oxygenation (ECMO).

[0366] By administering the fusion protein of the present invention, the infection with a coronavirus and in particular with SARS-CoV-2 is prevented, i.e. the treated subject does not develop symptoms of an infection with SARS-CoV-2.

[0367] In one embodiment, the fusion protein of the present invention is administered to a subject which has been in contact with a subject infected with SARS-CoV-2. Subjects which have been in contact with a subject infected with SARS-CoV-2 can be identified by use of a “Corona warning app” installed on the smartphone.

[0368] In one embodiment, the fusion protein of the present invention is administered to a subject for which a test with a throat or nasal swab of said subject indicates that it is infected with SARS-CoV-2, but which has not developed any symptoms of an infection with SARS-CoV-2.

[0369] In the treatment or prevention of an infection with a coronavirus binding to ACE2 and in particular SARS-CoV-2 the fusion protein of the present invention may be combined with a known anti-viral agent. Anti-viral agents are medicaments used to treat viral infections and include both specific anti-viral agents and broad-spectrum viral agents. Suitable anti-viral agents include, but are not limited to, nucleoside analoga, inhibitors of viral protease, inhibitors of viral polymerase, blockers of virus entry into the cell, Janus kinase inhibitors, but also inhibitors of inflammatory mediators.

[0370] In specific embodiments, the anti-viral agent is selected from the group consisting of remdesivir, arbidol HCl, ritonavir, lopinavir, darunavir, ribavirin, chloroquin and derivatives thereof such as hydroxychloroquin, nitazoxanide, camostat mesilate, anti-IL6 and anti-IL6 receptor antibodies such as tocilizumab, siltuximab and sarilumab and baricitinib phosphate.

[0371] In the treatment or prevention of an infection with SARS-CoV-2 the fusion protein of the present invention may be combined with an anti-SARS-CoV-2 monoclonal antibody. Anti-SARS-CoV2 monoclonal antibodies include, but are not limited to, bamlanivimab (LY-CoV555 20; LY3819253;) developed by Eli Lilly and Company, etesevimab (LY-3832479; LY-COV016; JS-016; NP-005), REGN-COV2 which is a cocktail of REGN10933 (casivirimab) and REGN10987 (imdevimab) and which is developed by Regeneron, sotrovimab (VIR-7831; GSK4182136;) developed by Vir Biotechnology and GlaxoSmithKline, CT-P59 developed by Celltrion, AZD 7442 which is a combination of antibodies AZD8895 and AZD1061 and which is developed by Astra Zeneca, JS016 developed by Junshi Biosciences, TY027 developed 25 by Tychan Pte Ltd, BRII-96 and BRII-98 developed by Brii Biosciences, SCTA01 developed by Sinocelltech Ltd, ADM03820 developed by Ology Bioservices, BI767551 developed by Boehringer Ingelheim and others and COR-101 developed by Corat Therapeutics.

[0372] Apart from its function in binding coronaviruses, ACE2 has also been implicated in several disorders and diseases such as hypertension (including high blood pressure), congestive heart failure, chronic heart failure, acute heart failure, contractile heart failure, myocardial infarction, arteriosclerosis, kidney failure, renal failure, Acute Respiratory Distress Syndrome (ARDS), Acute Lung Injury (ALI), chronic obstructive pulmonary disease (COPD), pulmonary hypertension, renal fibrosis, chronic renal failure, acute renal failure, acute kidney injury, inflammatory bowel disease and multi-organ dysfunction syndrome. Hence, the fusion protein of the present invention can also be used in the treatment of these disorders and diseases.

[0373] While the invention has been illustrated and described in detail in the drawings and foregoing description, such illustration and description are to be considered illustrative or exemplary and not restrictive. The invention is not limited to the disclosed embodiments. Other variations to the disclosed embodiments can be understood and effected by those skilled in the art in practicing a claimed invention, from a study of the drawings, the disclosure, and the dependent claims.

[0374] The detailed description is merely exemplary in nature and is not intended to limit application and uses. The following examples further illustrate the present invention without, however, limiting the scope of the invention thereto. Various changes and modifications can be made by those skilled in the art on the basis of the description of the invention, and such changes and modifications are also included in the present invention.

### EXAMPLES

### A. Materials and Methods

### 1. Construction of Fusion Proteins

[0375] Four fusion proteins of the present invention were constructed. In addition, four fusion proteins comprising the Fc portion of human IgG1 instead of the Fc portion of human IgG4 were constructed as comparative examples. The following Table 1 shows the parts of the fusion proteins.

TABLE 1
Parts of the fusion proteins tested

| Fusion | | Enzymatically | | Fc | SEQ ID |
|---|---|---|---|---|---|
| protein no. | ACE2 | active | Linker | portion | No. |
| 1 | 18-732 | + | IgG4 | IgG4 | 6 |
| 2 | 18-740 | + | IgG4 | IgG4 | 7 |
| 3 | 18-732 | − | IgG4 | IgG4 | 8 |
| 4 | 18-740 | − | IgG4 | IgG4 | 9 |
| 5 | 18-732 | + | IgG1 | IgG1 | 10 |
| 6 | 18-740 | + | IgG1 | IgG1 | 11 |
| 7 | 18-732 | − | IgG1 | IgG1 | 12 |
| 8 | 18-740 | − | IgG1 | IgG1 | 13 |

[0376] The nucleic acid sequence encoding the construct was inserted into a variant of the expression vector pcDNA3.1 (Invitrogen V860-20) using Hindlll/Xhol restriction enzymes. The albumin signal sequence according to SEQ ID No. 17 was attached to the N-terminus of the constructs. The expression vector was then used to transiently transfect 293 cells using the FreeStyle expression system (available from ThermoFisher). On day six samples were analyzed for cell viability and cell density and supernatants were harvested by two step centrifugation and were sterile-filtered. The material was pooled and half of it was stored at −80° C. until purification. The other half was subjected to Protein A purification. Additionally, small samples (˜0.5 mL) were taken from the pools to determine expression by bio-layer interferometry (BLI).

### 2. Protein Purification

[0377] Purification of the transient material was performed by protein A column chromatography followed by preparative SEC. For protein A purification, after loading the sample, the column was washed and the ACE2-Fc fusion proteins were eluted using 40 mM NaAc, pH=3.0. Following elution, samples were first neutralized to pH=7.5 using 1M Tris, pH=9.0, subsequently diluted 1:1 with 50 mM Tris, pH=7.5, 300 mM NaCl and concentrated to 10 mg/mL using spin filters. Concentrated proteins were further purified with a Superdex 200 increase (GE Healthcare) column equilibrated with 50 mM Tris, pH=7.5, 150 NaCL. The main peak was pooled, the protein concentration was adjusted to 1 mg/mL, passed over a sterilizing filter and stored at 4° C. until further usage.

### 3. Determination of Protein Concentration (A280) by Slope Spectrometry

[0378] Purified material of the different ACE2-Fc fusion proteins was analyzed by slope spectroscopy to determine the protein content. Verification of absence of buffer interference was checked and by using a variable pathlength, the protein concentration was accurately measured without any prerequisites for sample predilution during the purification process.

### 4. Determination of High Molecular Weight Species by Analytical Size Exclusion Chromatography

[0379] The different purified protein constructs were analyzed by analytical Size Exclusion Chromatography (SEC). Briefly, samples were analyzed on a Waters H-Class bio UPLC system using an Acquity UPLC Protein BEH SEC column, 4.6 mm×150 mm, 200 Å, 1.7 μm. Detection was based on UV absorbance at 280 nm. 20 μg of sample was loaded, the mobile phase consisted of 20 mM sodium phosphate pH=7.0, 150 mM NaCl and proteins were eluted isocratically at a flow rate of 0.3 mL/min.

### 5. Stability Study

[0380] For all eight purified Fc-fusion proteins the stability study was performed using 740 μL (300 μL backup) aliquots at a concentration of 1 mg/mL in tightly closed vials. One vial of each Fc-fusion protein was incubated first for 3 weeks at 37° C. Subsequently, a second vial per Fc-fusion protein was added to the incubation. Moreover, after 2 additional weeks a 3rd vial was added to the incubation per Fc-fusion protein. The incubation lasted for one additional week so that the 1st set of vials were incubated for 6 weeks, the 2nd set of vials for 3 weeks and the 3rd set of vials for 1 week. Finally, in parallel to the last week of the stability study a 4th set of vials underwent 3×freeze-thaw (F/T) cycles at −80° C. All the samples from the test intervals, i.e. 6, 3 and 1 week together with the F/T samples were analysed using the method explained above for analytical SEC. For T=0, data from testing after purification was used.

### 6. Determination of O-Glycosylation by Pepmap

[0381] Purified ACE2-Fc fusion proteins were analyzed by peptide mapping using UPLC-RP/MS. Proteins were denatured in guanidine hydrochloride, followed by reduction with DTT for 1 hour at 4° C. and alkylation with iodoacetamide for 30 minutes at room temperature in the dark. Samples were subjected to a proteolytic digest with a cocktail of trypsin and Lys-C enzymes for 4 hours. Proteolytic peptides were separated on a C18 reversed phase UPLC (e.g. Peptide BEH C18, 2.1×300 mm, 300 Å, 1.7 μm) column using 0.1% formic acid in Milli-Q and acetonitrile as the mobile phases in a peptide mapping gradient of 60 minutes with an initial hold time of 4.5 minutes. Two different collision energies were applied to improve the coverage of glycopeptides (low collision energy from 15-30 eV and high collision energy from 60-100 eV). Detection of the peptides was performed by UV at 214 nm and by mass spectrometry using a Xevo G2-XS QToF mass spectrometer from Waters. Analysis was performed in MS^{E} mode to obtain peptide verification by fragmentation (MS/MS) in addition to mass verification by MS. MS^{E} spectra were processed using Waters UNIFI 1.9 software, which includes Waters MaxEnt3 for deconvolution. Glu1-Fibrinopeptide B was infused during the run using a separate reference probe, and used for lockmass correction. Deconvoluted masses were matched to the theoretical sequence with a 10 ppm ion tolerance for precursor ion masses, and 20 ppm for fragment ion masses. For the identification of glycosylated peptides, a limited library of C-, N- and O-glycans was included in the search. To increase confidence of the assignments, fragment spectra of glycosylated peptides were checked for the presence of marker ions (e.g. at m/z 292 and 204). In addition, for the sequence coverage maps, peptides with less than 3 fragment ions were excluded.

### 7. Determination of Binding of the Fusion Proteins to the Spike Protein of SARS-CoV-2

### a) Surface Plasmon Resonance with the Spike Protein of SARS-CoV-2 (Wild-Type)

[0382] The binding of the fusion proteins to the Spike protein of SARS-CoV-2 was analyzed by surface plasmon resonance (Biacore) using commercially available SARS-CoV-2 Spike protein (ACROBiosystems, Newark, USA).

### Materials

[0383] The SARS-CoV-2 RBD with his tag and an AviTag was from Acrobiosystems (Cat. No. SPD-C82E9, Lot. No. BV3541b-2043F1-RD). The protein was reconstituted according to the manufacturer's recommendations, aliquoted, shock frozen in liquid nitrogen and stored at −80° C. until use. A fresh aliquot was used for each measurement.

[0384] The running buffer was 1×HBS-EP+ prepared from 10×HBS-EP+ (Cytiva) by a 1:10 dilution with MilliQ water. The diluted buffer was filtered through a 0.1 μm filter.

[0385] The Biotin CAPture kit (Cytiva) and a Biacore X-100 system were used for the measurements.

### Methods

[0386] The ACE2-Fcs were diluted to 200 nM with 1×HBS-EP+ buffer. The concentration was verified by UV spectrometry in a 10 mm quartz cuvette, using an A_{280, 0.1%} of 1.84. The 200 nM ACE2-Fc was diluted with 1×HBS-EP+ to 40, 8, 1.6 and 0.32 nM. The thawed SARS-CoV-2 RBD domain was diluted 1:100 with 1×HBS-EP+ to a concentration of 2 μg/mL. A single cycle kinetic method was used. The flow was 30 μL/min. Before each measurement, three injections of regeneration solution were used to condition the chip. The immobilization time for the SARS-CoV-2 with AviTag (Acrobiosystems) was 30 s. After ligand immobilization, the different concentrations of ACE2-Fc (0.32, 1.6, 8, 40 and 200 nM) were injected over the immobilized ligand in a single-cycle kinetic mode, starting from low to high. The baseline was obtained from two cycles with buffer injections only.

[0387] The data was evaluated in the Biacore software with a 1:1 binding model that yields a K_{D}.

### b) Surface Plasmon Resonance with the Spike Protein of the Delta Variant of SARS-CoV-2

[0388] The ACE2-Fc constructs were diluted to 1 nM with 1×HBS-EP+ buffer. The thawed SARS COV-2 Spike Trimer variants (obtained from AcroBiosystems, catalogue number SPN-C82E7) were prediluted to 200 nM with 1×HBS-EP+ buffer and subsequently diluted with 1×HBS-EP+ buffer to the final assay concentrations of 20.00, 6.67, 2.22, 0.74 and 0.25 nM. Before the experiment the chip was immobilised with Anti-human IgG Fc antibody to a capture level of 1000 RU via a Amine coupling kit (NHS/EDC). Before each experiment 6 startup cycles with the ligand ACE2-FC construct as well as the analyte Spike Trimers were run in order to condition the chip. Before each sample injection a blank buffer sample was injected for subsequent blank subtraction. A single cycle method was used for the analysis. The flow rate was set to 20 μL/min and 1×HBS-EP+ was used as the running buffer. The immobilisation time for the ACE2-Fc constructs was 80 s, while the sample contact times were 600 s for the association and 900 s for the dissociation period. The Spike Trimer samples were injected over the immobilized ACE2-Fc constructs in a single-cycle kinetic assay, starting from low to high sample concentration in triplicate measurements. After each sample cycle the chip surface was regenerated with a 3M solution of MgCl₂. The kinetic values were obtained by a double referenced (Reference flow cell and blank buffer referenced) kinetic screen of the sensorgrams via the Biacore T200 Evaluation software. Baseline plots and capture level plots of each sample cycle were generated for assay verification.

### c) ELISA 1

[0389] To quantify the binding of the fusion proteins to the Spike protein of SARS-CoV-2 an ELISA assay was performed. The ELISA plate was coated with 0.2 μg/well of commercially available SARS-CoV-2 Spike protein (ACROBiosystems, Newark, USA) in coating buffer (15 mM Na₂CO₃, 35 mM NAHCO₃, 7.7 mM NaN₃, pH 9.6). The wells were washed four times with 300 μl per well washing buffer (0.05% Tween-20 in TBS, pH 7.4). The wells were blocked with 300 μl blocking buffer (2% BSA in washing buffer, pH 7.4) at 37° C. for 90 minutes, before the wells were washed four times with 300 μl per well washing buffer (0.05% Tween-20 in TBS, pH 7.4). Then 100 μl of serially diluted fusion protein were added to each well and the wells were incubated at 37° C. for one hour. The fusion protein was diluted in sample dilution buffer (0.5% BSA in washing buffer, pH 7.4). After incubation the wells were washed four times with 300 μl per well washing buffer (0.05% Tween-20 in TBS, pH 7.4).

[0390] Then, 100 μl of a horseradish peroxidase-conjugated anti-human Fc antibody (diluted in 0.5% BSA in washing buffer, pH 7.4) was added to each well and the wells were incubated at 37° C. for one hour. After incubation the wells were washed four times with 300 μl per well washing buffer (0.05% Tween-20 in TBS, pH 7.4), before 200 μl of horseradish peroxidase substrate (8 μl H₂O₂ and 100 μl 10 mg/ml TMB in 10 ml substrate solution A (50 mM Na₂HPO₄×12H₂O, 25 mM citric acid, pH 5.5) were added and the wells were incubated at 37° C. for twenty minutes in the dark. The reaction was terminated by adding 50 μl of 1 M sulfuric acid to each well. The plates were read in an ELISA reader at OD450 nm.

[0391] Inhibition of binding of SARS-CoV-2 Spike S1 protein to ACE2 was tested using the ACE2:SARS-CoV-2 Spike S1 Inhibitor Screening Assay Kit (BPS Bioscience; Catalog #79945) according to the instructions of the manufacturer with an adapted neutralization procedure. Briefly, biotinylated SARS-CoV-2 Spike S1 protein (25 nM) was incubated with serial dilutions of the ACE2-Fc fusion proteins in a 96-well neutralization plate at room temperature for one hour with slow shaking (=neutralization mix).

[0392] ACE2 protein was attached to a nickel-coated 96-well plate at a concentration of 1 μg/mL and incubated at room temperature for one hour with slow shaking. Unbound ACE2 was removed by a washing step. Subsequently, the neutralization mix was transferred to the ACE2 coated plate and the plate was incubated at room temperature for one hour with slow shaking. Following a 10 min blocking step, the plate was incubated for 1 hour at room temperature with slow shaking with Streptavidin-HRP. Following a washing and a 10 min blocking, HRP substrate was added and the plate was analyzed on a chemiluminescence reader.

### d) ELISA 2

[0393] To quantify the binding of the fusion protein to the Spike protein of SARS-CoV-2 an ELISA assay was performed. The ELISA plate (NUNC) was coated with 1.0 μg/mL of commercially available SARS-CoV-2 Spike protein (SPN-C52H9, ACROBiosystems) using 100 μL/well in coating buffer (PBS). The wells were incubated over night at 4° C. Next day, the coating was removed and the wells were washed three times with 300 μl per well of washing buffer (10 mM sodium phosphate, 150 mM NaCl, 0.05% Tween-20, pH=7.5). The wells were blocked with 200 μl blocking buffer (wash buffer supplemented with 1% BSA) at room temperature for one hour, while shaking at 150 rpm. Afterwards the blocking buffer was removed and 100 μl of serially diluted fusion protein were added to each well and the wells were incubated at room temperature for one hour at 150 rpm. The fusion protein was diluted in sample dilution buffer (1% BSA in washing buffer). After incubation the wells were washed three times with 300 μl per well washing buffer. Next, 100 μl of a horseradish peroxidase-conjugated anti-human IgG4Fc antibody (Southern Biotech, 9200-05, diluted 1:4000 in blocking buffer) was added to each well and the wells were incubated at room temperature for one hour while shaking. After incubation, the wells were washed three times with 300 μl per well of washing buffer, before 100 μl of TMB solution (Invitrogen, SB02) was added and the wells were incubated at room temperature for two minutes. The reaction was stopped with 100 μl/well 1 M HCl and incubated for 30 seconds at room temperature protected from light while shaking. After further incubation for 15 minutes at room temperature in the dark, the plates were read in a microplate reader (Synergy HTX, BioTek) at OD450 nm with a reference at OD655. The concentrations (in μg/mL) were plotted against OD450 (after background subtraction) using a 4-parameter logistic curve fit model.

### 8. Analysis of Infection with SARS-CoV-2 Strain Victoria/1/2020 in the Presence of the Fusion Proteins

[0394] The analysis of infection with SARS-CoV-2 was performed with Vero cells in the absence or presence of the fusion proteins. Infection with SARS-CoV-2 was detected by determining the number of immunoplaques.

[0395] VeroE6 cells were plated in a 96-well plate and incubated overnight. Six two-fold serial dilutions of the ACE2-Fc fusion protein samples were prepared in 96-well transfer plate(s). The Victoria/1/2020 SARS-CoV-2 wild-type virus was added sequentially to the dilutions at a target working concentration of approximately 100 plaque-forming units [PFU]/well and incubated at 37° C. for 60 to 90 minutes. Following the incubation period, the neutralization mixture was transferred to the assay plates with VeroE6 cells and subsequently incubated at 37° C. and 5% CO2. Following a 60 to 90 minute incubation period, carboxymethyl cellulose (CMC) overlay medium was added to the wells and the plates were incubated for another 24 hours. Then, the cells were fixed and stained using an antibody pair specific for the SARS-CoV-2 RBD S protein. Immunoplaques were visualized using TrueBlueTM substrate and counted using an Immunospot Analyzer (CTL). The immunoplaque counts were exported to SoftMax Pro (Molecular Devices) and the neutralizing titer of a serum sample was calculated as the reciprocal dilution corresponding to the 50% neutralization titer (ID50) for that specific sample.

### 9. ACE2 Activity Assay

[0396] An ACE2 activity assay kit from Abcam (ab273297) was used to measure the enzymatic activity of the constructs. The assay was performed according to manufacturer's manual. Two commercially available ACE2-Fc fusion proteins (from Genscript (Cat.No. Z03484-1) and Acrobiosystems (Cat.No. AC2-H5257) were used as reference proteins (Ref1 and Ref2). The assay is based on the cleavage of a synthetic peptidyl-MCA derivate. This substrate is cleaved by the active ACE2 to release the free MCA fluorophore that has an increased fluorescence intensity at 420 nm (excitation at 320 nm) compared to the peptidyl-MCA. The amount of released MCA due to cleavage from ACE2 was calculated from the slope of the increase in fluorescence intensity and a standard curve with known MCA concentrations.

### 10. Virus Neutralization Assay

### Virus Strains

[0397] SARS-CoV-2-Munich-TUM-1 (EPI_ISL_582134) was isolated from a nasopharyngeal swab of a COVID-19 positive patient in Munich (January 2020) and grown and propagated on Vero E6 cells in DMEM medium (5% FCS, 1% penicillin/streptomycin, 200 mmol/L L-glutamine, 1% MEM-non-essential amino acids, 1% sodium-pyruvate (all from Gibco).

[0398] SARS-CoV-2 D614G was isolated from patient material in Munich, Germany (April 2020), grown on Caco-2 cells and propagated on Vero E6 cells.

[0399] SARS-CoV-Fra-1 from Frankfurt (AY291315.1) was grown and propagated on Vero E6 cells in DMEM medium (10% fetal calf serum (FCS), 100 μg/ml Streptomycin, 100 IU/ml Penicillin) (all from Gibco).

### Viral Neutralization Assay Followed by In-Cell ELISA

[0400] VeroE6 cells were plated in a 96-well plate at 1.6E04 cells/well in DMEM medium (Gibco) supplemented with 5% FCS, 1% penicillin-streptomycin, 200 mmol/L L-glutamine, 1% MEM-non-essential amino acids, 1% sodium-pyruvate (all from Gibco) and incubated overnight at 37° C. and 5% CO₂. Serial dilutions of the ACE2-Fc fusion proteins were mixed with virus in fresh media and pre-incubated for 1 hour at 37° C. The VeroE6 cells were infected at the MOI of 0.3 with the neutralized virus solution for 1 hour at 37° C. Next, the neutralization mix was removed, culture medium was added, and cells were incubated at 37° C. for 24 hours. Mock cells represent uninfected Vero E6 cells, incubated with culture medium. After 24 hours cells were washed once with PBS and fixed with 4% paraformaldehyde (ChemCruz) for 10 min at RT. Following a washing step with PBS, fixed VeroE6 cells were permeabilized with 0.5% saponin (Roth) in PBS for 10 min at room temperature. Next, the permeabilization solution was removed and cells were blocked with a mixture of 0.1% saponin and 10% goat serum (Sigma) in PBS with gentle shaking at RT for 1 hour. Subsequently, Vero E6 cells were incubated with a 1:500 dilution of an anti-dsRNA J2 antibody (Jena Bioscience) in PBS supplemented with 1% FCS at 4° C. overnight with shaking, followed by four washing steps with wash buffer (1×PBS supplemented with 0.05% Tween-20 (Roth)). Next, the plates were incubated with a 1:2000 dilution of a goat anti-mouse IgG2a-HRP antibody (Southern Biotech) in PBS supplemented with 1% FCS and incubated with gently shaking at RT for 1 hour. Following four washing steps, 3,3′,5,5′-Tetramethylbenzidin (TMB) substrate (Invitrogen) was added to the wells and incubated in the dark for 10 min. Colorimetric detection on a Tecan infinite F200 pro plate reader at 450 nm and at 560 nm was performed after stopping the color reaction by the addition of 2N H₂SO₄ (Roth). Following normalization against values obtained with uninfected Vero E6 cells, optical densities were transformed in percent neutralization values and half-maximal inhibitory concentrations (IC50 values) were calculated (Graphpad Prism).

### 11. Determination of Binding Affinity of the ACE2 Fusion Proteins to Fc-Receptors Using Surface Plasmon Resonance (SPR)

[0401] A Biacore T200 was used for the Fc-receptor binding studies. For the FcγRI and the FcγRIIIa experiments, the His-tagged FcγRI and FcγRIIIa with a concentration of 1.5 nM were captured by injection of the solutions for 90 seconds with a flow rate of 5 μL/min over a covalently immobilized anti-his tag antibody on a CM5 chip. The running buffer was HBS-EP+ pH 7.4 (Cytiva). Five different concentrations of the ACE2-Fc constructs were injected in a single-cycle kinetic mode (3.7-300 nM for the experiment with FcγRI and 25-2000 nM for FcγRIIIa). The FcγRI-binding data was fit to a heterogeneous ligand model and the first binding constant was reported. The FcγRIIIa-binding data was fit to a two-state reaction model to derive the binding constant. For the FcRn experiments, the FcRn was covalently immobilized on a CM5 chip to around 50 RU (Response Units). The sample buffer was HBS-EP+ pH 6.0 (Cytiva). The ACE2-Fc constructs were injected in five different concentrations from 205 to 8000 nM in a single-cycle kinetic mode. The FcRn binding was evaluated with a steady-state affinity fit.

### 12. Determination of Virus Neutralization with a Cell Viability Assay

### Virus Strains

[0402] SARS-CoV-2-Munich-TUM-1 (EPI_ISL_582134) was isolated from a nasopharyngeal swab of a COVID-19 positive patient in Munich (January 2020) and grown and propagated on Vero E6 cells in DMEM medium (5% FCS, 1% penicillin/streptomycin, 200 mmol/L L-glutamine, 1% MEM-non-essential amino acids, 1% sodium-pyruvate (all from Gibco).

[0403] SARS-CoV-2 D614G was isolated from patient material in Munich, Germany (April 2020), grown on Caco-2 cells and propagated on Vero E6 cells.

[0404] SARS-CoV-2 B.1.1.7 was obtained from Dr. Bugert from the Institute for Microbiology of the Bundeswehr (GISAID: EPI_ISL_755639) and propagated on Vero E6 cells.

[0405] SARS-CoV-2 B.1.351 was obtained from LGL (Oberschleißheim, Germany). It was isolated from a patient in Germany, grown on Caco-2 cells and propagated on Vero E6 cells. The identity of the variant was confirmed by sequencing.

[0406] 24 h before infection, human lung epithelial A549 cells (ATCC-CCL-185), engineered to overexpress the human angiotensin-converting enzyme 2 receptor, ACE2 (A549-hACE2), were plated at 15,000 cells per well in a 96-well white well half area plate with clear bottom (Corning) in DMEM containing 2% fetal bovine serum, 100 U/mL penicillin-streptomycin and 1% NEAA.

[0407] SARS-CoV-2-Munich-TUM-1 and SARS-CoV-2 variants D614G, B1.1.7 and B.1.351 were grown on Vero E6 cells. For this, 15×10⁶ Vero E6 cells were seeded in each T150 flask one day before infection. The infection was performed by adding the virus with a MOI of 0.01 at 37° C., 5% CO₂. One hour after adding the virus the medium was changed to DMEM with 10% fetal bovine serum, 100 U/mL penicillin-streptomycin and 1% NEAA, 200 mmol/l L-glutamine and 1% sodium pyruvate (all from Gibco).

[0408] Infection was determined using a luminometric readout of virus-induced cytotoxicity. In brief, 72 h after infection cells were treated according to manufacturer's instructions: 15 μl CellTiter-Glo 2.0 reagent (Promega, Wisconsin, USA) were added to each well, incubated for 10 min in the dark at room temperature and luminescence was recorded (0.5 s integration time, no filter) using the Infinite F200 microplate reader (Tecan). Viability of cells and the corresponding infectious titer for each virus isolate was calculated by normalization of infected cells to untreated control cells (set to 100%). A serial dilution of constructs was performed and mixed with a defined volume of virus stocks of the indicated SARS-CoV-2 clinical isolates resulting in 80% cytotoxicity. After 1 h of pre-incubation, the mix of construct and the respective SARS-CoV-2 isolates was added to A549-hACE2 cells. 72 h after infection virus-induced cytotoxicity was determined as described above.

### 13. Determination of Virus Titer by a Plaque Assay

[0409] Viral titers were determined as described by Baer et al. (2014) J Vis Exp, e52065 with some modifications. Briefly, HepG2 or Vero E6 cells were plated in a 12-well plate at 5E05 cells/well in DMEM medium (Gibco) supplemented with 5% FCS, 1% P/S, 200 mmol/L L-glutamine, 1% MEM-NEAA, 1% sodium-pyruvate (all from Gibco) and incubated overnight at 37° C. and 5% CO₂. Cells were infected with serial dilution of virus sample in cell culture medium at 37° C. for one hour. After discarding the supernatant, 1 mL of 5% carboxymethylcellulose (Sigma) diluted in Minimum Essential Media (Gibco) was added per well and the plate was incubated at 37° C. until obvious plaques appeared. After removing the supernatant, cells were fixed with 10% paraformaldehyde (ChemCruz) at RT for 30 min. Next, a washing step with PBS was performed, followed by the addition of 1% crystal violet (Sigma; diluted in 20% methanol and water). Following an incubation time of 15 min at RT, the solution was washed away with PBS and the plate was dried. The viral titer (PFU/mL) of the sample was determined by counting the average number of plaques for a dilution and the inverse of the total dilution factor.

### B. Results

[0410] FIG. 1 shows that for those fusion proteins having the shorter ACE2 fragment comprising amino acids 18 to 732 (constructs 1, 3, 5 and 7) a higher yield compared to the fusion proteins comprising amino acids 18 to 740 of ACE2 (constructs 2, 4, 6 and 8) was obtained.

[0411] Further, the fusion proteins having the shorter ACE2 fragment comprising amino acids 18 to 732 (constructs 1, 3, 5 and 7) had a lower percentage of high molecular weight species indicating protein aggregates than the fusion proteins comprising amino acids 18 to 740 of ACE2 (constructs 2, 4, 6 and 8) (see FIG. 2). The same was observed after storage for three or six weeks (see FIG. 10).

[0412] In the surface plasmon resonance all constructs showed comparable binding to the Spike protein of SARS-CoV-2 (see Table 2):

TABLE 2

| Construct | Replicate | K_{D} (M) | kₒₙ (1/Ms) | k_{off} (1/s) |
|---|---|---|---|---|
| Construct 1 | 1 | 4.246E−9 | 9.352E+4 | 3.971E−4 |
| | 2 | 3.974E−9 | 9.417E+4 | 3.742E−4 |
| Construct 2 | 1 | 4.282E−9 | 9.958E+4 | 4.264E−4 |
| | 2 | 4.314E−9 | 1.039E+5 | 4.482E−4 |
| Construct 3 | 1 | 4.231E−9 | 9.006E+4 | 3.811E−4 |
| | 2 | 4.256E−9 | 9.314E+4 | 3.964E−4 |
| Construct 4 | 1 | 4.613E−9 | 9.213E+4 | 4.250E−4 |
| | 2 | 5.170E−9 | 8.718E+4 | 4.507E−4 |
| Construct 5 | 1 | 4.111E−9 | 9.585E+4 | 3.941E−4 |
| | 2 | 3.682E−9 | 9.523E+4 | 3.507E−4 |
| Construct 6 | 1 | 4.106E−9 | 9.451E+4 | 3.880E−4 |
| | 2 | 4.804E−9 | 9.659E+4 | 4.640E−4 |
| Construct 7 | 1 | 3.939E−9 | 9.114E+4 | 3.590E−4 |
| | 2 | 3.832E−9 | 9.087E+4 | 3.482E−4 |
| Construct 8 | 1 | 4.213E−9 | 9.224E+4 | 3.886E−4 |
| | 2 | 4.348E−9 | 1.090E+5 | 4.740E−4 |

[0413] Comparable results were obtained with the Spike protein of the delta variant of SARS-CoV2 (see Table 3):

TABLE 3

| Construct | K_{D} [M] | kₒₙ [1/Ms] | k_{off} [1/s] |
|---|---|---|---|
| Construct 1 | 1.44E−09 | 1.52E+05 | 2.17E−04 |
| Construct 5 | 1.44E−09 | 1.36E+05 | 1.94E−04 |

[0414] FIG. 3 shows that constructs 1, 3, 5 and 7 have essentially no O-glycosylation, while constructs 2, 4, 6, and 8 have varying amounts of single and double O-glycans.

[0415] FIG. 4 shows that all constructs 1 to 8 inhibited binding of SARS-CoV-2 Spike S1 protein to ACE2 as determined by ELISA 1.

[0416] Constructs 1, 3, 5 and 7 almost completely inhibited infection of VeroE6 cells by SARS-CoV-2 strain Victoria/1/2020 (see FIG. 5). All constructs neutralized SARS-CoV-2 strain Victoria/1/2020 with IC50 values in the range of 0.5 nM.

[0417] Constructs 1, 2, 5 and 6 cleave the same amount of the synthetic peptidyl-MCA derivate after 30 min of incubation, while the constructs with mutations in the active ACE2 site have complete lost the enzymatic activity (see FIGS. 6a and 6b).

[0418] All constructs 1 to 8 neutralized SARS-CoV with IC50 values in the range of 150 nM (see FIG. 7a), SARS-CoV-2 with IC50 values in the range of 10 nM (see FIG. 7b) and SARS-CoV-2 D614G with IC50 values in the range of 1 nM (see FIG. 7c).

[0419] The ACE2-IgG4-Fc fusion proteins showed slightly lower affinity to FcγRI when compared to the IgG1 counterparts (see Table 4). The ACE2-IgG4-Fc showed no binding to FcγRIIIa, which contrasts with the ACE2-IgG1-Fc molecules (see Table 4). All four constructs had similar affinity to the FcRn (see Table 4).

TABLE 4
Binding affinities of ACE2-Fc constructs to Fc-receptors

| | FcγRI | FcγRIIIa | FcRn |
|---|---|---|---|
| Construct | K_{D} (nM) | K_{D} (μM) | K_{D} (μM) |
| 1 | 45 ± 0.2 | No binding | 2.9 ± 0.68 |
| 3 | 43 ± 5.2 | No binding | 3.9 ± 0.62 |
| 5 | 10 ± 2.2 | 0.6 ± 0.45 | 3.4 ± 0.05 |
| 7 | 11 ± 0.8 | 0.8 ± 0.54 | 3.5 ± 0.62 |

Mean ± SD of duplicate measurements

[0420] Construct 1 binds to the Spike protein of wild-type SARS-CoV-2 with an EC50 value of 25.9 ng/ml as determined by ELISA 2 (see FIG. 8).

[0421] FIG. 9 shows that the ACE2-Fc fusion proteins according to SEQ ID Nos. 6 and 8 (constructs 1 and 3) neutralize all clinical isolates of SARS-CoV-2 tested. The more infectious the SARS-CoV-2 variant is, the better the fusion proteins neutralize it, as evidenced by the lower IC50 (50% inhibitory concentration) values. In particular, the fusion proteins are most effective against the SARS-CoV-2 variants B.1.1.7 and B.1.351 which have been shown to be refractory to neutralization by most monoclonal antibodies directed against the N-terminal domain of the Spike protein and monoclonal antibodies against the receptor-binding motif (Wang et al. (2021) Nature). In addition, the B.1.351 variant shows an escape from neutralization by convalescent plasma and sera from individuals who have been vaccinated.

[0422] The IC50 values for the different constructs and clinical isolates are shown in Table 5.

TABLE 5
IC50 and 95% confidence interval for different constructs and
clinical isolates

| | | IC50 | |
|---|---|---|---|
| Construct | Isolate | (nM) | CI95 |
| 1 | SARS-COV-2-Munich-TUM-1 | 4.7 | 3.9-5.8 |
| 1 | SARS-COV-2 D14G | 1.3 | 1.0-1.6 |
| 1 | SARS-COV-2 B.1.1.7 | 0.6 | 0.5-0.8 |
| 1 | SARS-COV-2 B.1.351 | 0.4 | 0.3-0.5 |
| 3 | SARS-COV-2-Munich-TUM-1 | 7.4 | 6.2-8.6 |
| 3 | SARS-COV-2 D14G | 1.6 | 1.3-2.0 |
| 3 | SARS-COV-2 B.1.1.7 | 0.6 | 0.4-0.8 |
| 3 | SARS-COV-2 B.1.351 | 0.5 | 0.4-0.7 |

1. A fusion protein comprising a first part comprising a fragment of human ACE2 or a variant of said fragment, said human ACE2 having the amino acid sequence according to SEQ ID No. 1, and a second part comprising a variant of the Fc portion of human IgG1, said variant having the amino acid sequence according to SEQ ID No. 19.

2. The fusion protein according to claim 1,
wherein the first part and the second part are linked by the amino acid sequence according to SEQ ID No. 15.

3. The fusion protein according to claim 1,
wherein the fragment of human ACE2 consists of a protein with the amino acid sequence according to SEQ ID No. 2.

4. The fusion protein according to claim 1,
wherein the fragment of human ACE2 is the extracellular domain of ACE2 consisting of a protein with the amino acid sequence according to SEQ ID No. 3.

5. The fusion protein according to claim 1,
having the amino acid sequence according to SEQ ID No. 20 or 21.

6. The fusion protein according to claim 1, wherein the variant of the human ACE2 fragment is an enzymatically inactive variant of human ACE2.

7 The fusion protein according to claim 6,
wherein the enzymatically inactive variant of human ACE2 comprises a H374N and a H378N mutation, the numbering referring to SEQ ID No. 1.

8-9. (canceled)

10. The fusion protein according to claim 6,
wherein the enzymatically inactive variant of human ACE2 comprises a mutation at position 273, the numbering referring to SEQ ID No. 1.

11-13. (canceled)

14. The fusion protein according to claim 1, wherein the variant of the human ACE2 fragment comprises a S645C mutation, the numbering referring to SEQ ID No. 1.

15-82. (canceled)

83. A nucleic acid molecule comprising a nucleic acid sequence encoding the fusion protein according to claim 1.

84. An expression vector comprising the nucleic acid molecule according to claim 83.

85. A host cell comprising (i) the nucleic acid molecule according to claim 83 or (ii) an expression vector comprising the nucleic acid molecule.

86. A method for producing the fusion protein according to claim 1, comprising culturing a host cell in a suitable culture medium, wherein the host cell comprises (i) a nucleic acid molecule comprising a nucleic acid sequence encoding the fusion protein or (ii) an expression vector comprising a nucleic acid molecule comprising a nucleic acid sequence encoding the fusion protein.

87. (canceled)

88. A method for preventing and/or treating an infection with a coronavirus binding to ACE2, comprising administering the fusion protein according to claim 1.

89. The method according to claim 88, wherein the coronavirus binding to ACE2 is selected from the group consisting of SARS, SARS-COV-2 and NL63.

90. The method Fusion protein for use according to claim 88, wherein the fusion protein is administered in combination with an anti-viral agent.

91. (canceled)

92. The method according to claim 88, wherein the fusion protein is administered in combination with an antibody.

93. (canceled)

94. A method for treating hypertension (including high blood pressure), congestive heart failure, chronic heart failure, acute heart failure, contractile heart failure, myocardial infarction, arteriosclerosis, kidney failure, renal failure, Acute Respiratory Distress Syndrome (ARDS), Acute Lung Injury (ALI), chronic obstructive pulmonary disease (COPD), pulmonary hypertension, renal fibrosis, chronic renal failure, acute renal failure, acute kidney injury, inflammatory bowel disease and multi-organ dysfunction syndrome, comprising administering the fusion protein of claim 1.

95. A pharmaceutical composition comprising an effective amount of the fusion protein according claim 1 and a pharmaceutically acceptable carrier or excipient.

96. A pharmaceutical composition according to claim 95, further comprising an anti-viral agent.

The application's sequence listing, which the Patent Office published only in electronic form, follows.

SEQUENCE LISTING (94 sequences)

SEQ ID NO: 1 - protein, 805 aa, human [sequence omitted]

SEQ ID NO: 2 - protein, 715 aa, human
QSTIEEQAKTFLDKFNHEAEDLFYQSSLASWNYNTNITEENVQNMNNAGDKWSAFLKEQSTLAQMYPLQEIQNLTVKLQLQALQQNGSSVLSEDKSKRLNTILNTMSTIYSTGKVCNPDNPQECLLLEPGLNEIMANSLDYNERLWAWESWRSEVGKQLRPLYEEYVVLKNEMARANHYEDYGDYWRGDYEVNGVDGYDYSRGQLIEDVEHTFEEIKPLYEHLHAYVRAKLMNAYPSYISPIGCLPAHLLGDMWGRFWTNLYSLTVPFGQKPNIDVTDAMVDQAWDAQRIFKEAEKFFVSVGLPNMTQGFWENSMLTDPGNVQKAVCHPTAWDLGKGDFRILMCTKVTMDDFLTAHHEMGHIQYDMAYAAQPFLLRNGANEGFHEAVGEIMSLSAATPKHLKSIGLLSPDFQEDNETEINFLLKQALTIVGTLPFTYMLEKWRWMVFKGEIPKDQWMKKWWEMKREIVGVVEPVPHDETYCDPASLFHVSNDYSFIRYYTRTLYQFQFQEALCQAAKHEGPLHKCDISNSTEAGQKLFNMLRLGKSEPWTLALENVVGAKNMNVRPLLNYFEPLFTWLKDQNKNSFVGWSTDWSPYADQSIKVRISLKSALGDKAYEWNDNEMYLFRSSVAYAMRQYFLKVKNQMILFGEEDVRVANLKPRISFNFFVTAPKNVSDIIPRTEVEKAIRMSRSRINDAFRLNDNSLEFLGIQPTLG

SEQ ID NO: 3 - protein, 723 aa, human
QSTIEEQAKTFLDKFNHEAEDLFYQSSLASWNYNTNITEENVQNMNNAGDKWSAFLKEQSTLAQMYPLQEIQNLTVKLQLQALQQNGSSVLSEDKSKRLNTILNTMSTIYSTGKVCNPDNPQECLLLEPGLNEIMANSLDYNERLWAWESWRSEVGKQLRPLYEEYVVLKNEMARANHYEDYGDYWRGDYEVNGVDGYDYSRGQLIEDVEHTFEEIKPLYEHLHAYVRAKLMNAYPSYISPIGCLPAHLLGDMWGRFWTNLYSLTVPFGQKPNIDVTDAMVDQAWDAQRIFKEAEKFFVSVGLPNMTQGFWENSMLTDPGNVQKAVCHPTAWDLGKGDFRILMCTKVTMDDFLTAHHEMGHIQYDMAYAAQPFLLRNGANEGFHEAVGEIMSLSAATPKHLKSIGLLSPDFQEDNETEINFLLKQALTIVGTLPFTYMLEKWRWMVFKGEIPKDQWMKKWWEMKREIVGVVEPVPHDETYCDPASLFHVSNDYSFIRYYTRTLYQFQFQEALCQAAKHEGPLHKCDISNSTEAGQKLFNMLRLGKSEPWTLALENVVGAKNMNVRPLLNYFEPLFTWLKDQNKNSFVGWSTDWSPYADQSIKVRISLKSALGDKAYEWNDNEMYLFRSSVAYAMRQYFLKVKNQMILFGEEDVRVANLKPRISFNFFVTAPKNVSDIIPRTEVEKAIRMSRSRINDAFRLNDNSLEFLGIQPTLGPPNQPPVS

SEQ ID NO: 4 - protein, 13 aa, human
ESKYGPPCPPCPA

SEQ ID NO: 5 - protein, 216 aa, human
PEFLGGPSVFLFPPKPKDTLMISRTPEVTCVVVDVSQEDPEVQFNWYVDGVEVHNAKTKPREEQFNSTYRVVSVLTVLHQDWLNGKEYKCKVSNKGLPSSIEKTISKAKGQPREPQVYTLPPSQEEMTKNQVSLTCLVKGFYPSDIAVEWESNGQPENNYKTTPPVLDSDGSFFLYSRLTVDKSRWQEGNVFSCSVMHEALHNHYTQKSLSLSLGK

SEQ ID NO: 6 - protein, 944 aa, artificial
  fusion protein 1
QSTIEEQAKTFLDKFNHEAEDLFYQSSLASWNYNTNITEENVQNMNNAGDKWSAFLKEQSTLAQMYPLQEIQNLTVKLQLQALQQNGSSVLSEDKSKRLNTILNTMSTIYSTGKVCNPDNPQECLLLEPGLNEIMANSLDYNERLWAWESWRSEVGKQLRPLYEEYVVLKNEMARANHYEDYGDYWRGDYEVNGVDGYDYSRGQLIEDVEHTFEEIKPLYEHLHAYVRAKLMNAYPSYISPIGCLPAHLLGDMWGRFWTNLYSLTVPFGQKPNIDVTDAMVDQAWDAQRIFKEAEKFFVSVGLPNMTQGFWENSMLTDPGNVQKAVCHPTAWDLGKGDFRILMCTKVTMDDFLTAHHEMGHIQYDMAYAAQPFLLRNGANEGFHEAVGEIMSLSAATPKHLKSIGLLSPDFQEDNETEINFLLKQALTIVGTLPFTYMLEKWRWMVFKGEIPKDQWMKKWWEMKREIVGVVEPVPHDETYCDPASLFHVSNDYSFIRYYTRTLYQFQFQEALCQAAKHEGPLHKCDISNSTEAGQKLFNMLRLGKSEPWTLALENVVGAKNMNVRPLLNYFEPLFTWLKDQNKNSFVGWSTDWSPYADQSIKVRISLKSALGDKAYEWNDNEMYLFRSSVAYAMRQYFLKVKNQMILFGEEDVRVANLKPRISFNFFVTAPKNVSDIIPRTEVEKAIRMSRSRINDAFRLNDNSLEFLGIQPTLGESKYGPPCPPCPAPEFLGGPSVFLFPPKPKDTLMISRTPEVTCVVVDVSQEDPEVQFNWYVDGVEVHNAKTKPREEQFNSTYRVVSVLTVLHQDWLNGKEYKCKVSNKGLPSSIEKTISKAKGQPREPQVYTLPPSQEEMTKNQVSLTCLVKGFYPSDIAVEWESNGQPENNYKTTPPVLDSDGSFFLYSRLTVDKSRWQEGNVFSCSVMHEALHNHYTQKSLSLSLGK

SEQ ID NO: 7 - protein, 952 aa, artificial
  fusion protein 2
QSTIEEQAKTFLDKFNHEAEDLFYQSSLASWNYNTNITEENVQNMNNAGDKWSAFLKEQSTLAQMYPLQEIQNLTVKLQLQALQQNGSSVLSEDKSKRLNTILNTMSTIYSTGKVCNPDNPQECLLLEPGLNEIMANSLDYNERLWAWESWRSEVGKQLRPLYEEYVVLKNEMARANHYEDYGDYWRGDYEVNGVDGYDYSRGQLIEDVEHTFEEIKPLYEHLHAYVRAKLMNAYPSYISPIGCLPAHLLGDMWGRFWTNLYSLTVPFGQKPNIDVTDAMVDQAWDAQRIFKEAEKFFVSVGLPNMTQGFWENSMLTDPGNVQKAVCHPTAWDLGKGDFRILMCTKVTMDDFLTAHHEMGHIQYDMAYAAQPFLLRNGANEGFHEAVGEIMSLSAATPKHLKSIGLLSPDFQEDNETEINFLLKQALTIVGTLPFTYMLEKWRWMVFKGEIPKDQWMKKWWEMKREIVGVVEPVPHDETYCDPASLFHVSNDYSFIRYYTRTLYQFQFQEALCQAAKHEGPLHKCDISNSTEAGQKLFNMLRLGKSEPWTLALENVVGAKNMNVRPLLNYFEPLFTWLKDQNKNSFVGWSTDWSPYADQSIKVRISLKSALGDKAYEWNDNEMYLFRSSVAYAMRQYFLKVKNQMILFGEEDVRVANLKPRISFNFFVTAPKNVSDIIPRTEVEKAIRMSRSRINDAFRLNDNSLEFLGIQPTLGPPNQPPVSESKYGPPCPPCPAPEFLGGPSVFLFPPKPKDTLMISRTPEVTCVVVDVSQEDPEVQFNWYVDGVEVHNAKTKPREEQFNSTYRVVSVLTVLHQDWLNGKEYKCKVSNKGLPSSIEKTISKAKGQPREPQVYTLPPSQEEMTKNQVSLTCLVKGFYPSDIAVEWESNGQPENNYKTTPPVLDSDGSFFLYSRLTVDKSRWQEGNVFSCSVMHEALHNHYTQKSLSLSLGK

SEQ ID NO: 8 - protein, 944 aa, artificial
  fusion protein 3
QSTIEEQAKTFLDKFNHEAEDLFYQSSLASWNYNTNITEENVQNMNNAGDKWSAFLKEQSTLAQMYPLQEIQNLTVKLQLQALQQNGSSVLSEDKSKRLNTILNTMSTIYSTGKVCNPDNPQECLLLEPGLNEIMANSLDYNERLWAWESWRSEVGKQLRPLYEEYVVLKNEMARANHYEDYGDYWRGDYEVNGVDGYDYSRGQLIEDVEHTFEEIKPLYEHLHAYVRAKLMNAYPSYISPIGCLPAHLLGDMWGRFWTNLYSLTVPFGQKPNIDVTDAMVDQAWDAQRIFKEAEKFFVSVGLPNMTQGFWENSMLTDPGNVQKAVCHPTAWDLGKGDFRILMCTKVTMDDFLTAHNEMGNIQYDMAYAAQPFLLRNGANEGFHEAVGEIMSLSAATPKHLKSIGLLSPDFQEDNETEINFLLKQALTIVGTLPFTYMLEKWRWMVFKGEIPKDQWMKKWWEMKREIVGVVEPVPHDETYCDPASLFHVSNDYSFIRYYTRTLYQFQFQEALCQAAKHEGPLHKCDISNSTEAGQKLFNMLRLGKSEPWTLALENVVGAKNMNVRPLLNYFEPLFTWLKDQNKNSFVGWSTDWSPYADQSIKVRISLKSALGDKAYEWNDNEMYLFRSSVAYAMRQYFLKVKNQMILFGEEDVRVANLKPRISFNFFVTAPKNVSDIIPRTEVEKAIRMSRSRINDAFRLNDNSLEFLGIQPTLGESKYGPPCPPCPAPEFLGGPSVFLFPPKPKDTLMISRTPEVTCVVVDVSQEDPEVQFNWYVDGVEVHNAKTKPREEQFNSTYRVVSVLTVLHQDWLNGKEYKCKVSNKGLPSSIEKTISKAKGQPREPQVYTLPPSQEEMTKNQVSLTCLVKGFYPSDIAVEWESNGQPENNYKTTPPVLDSDGSFFLYSRLTVDKSRWQEGNVFSCSVMHEALHNHYTQKSLSLSLGK

SEQ ID NO: 9 - protein, 952 aa, artificial
  fusion protein 4
QSTIEEQAKTFLDKFNHEAEDLFYQSSLASWNYNTNITEENVQNMNNAGDKWSAFLKEQSTLAQMYPLQEIQNLTVKLQLQALQQNGSSVLSEDKSKRLNTILNTMSTIYSTGKVCNPDNPQECLLLEPGLNEIMANSLDYNERLWAWESWRSEVGKQLRPLYEEYVVLKNEMARANHYEDYGDYWRGDYEVNGVDGYDYSRGQLIEDVEHTFEEIKPLYEHLHAYVRAKLMNAYPSYISPIGCLPAHLLGDMWGRFWTNLYSLTVPFGQKPNIDVTDAMVDQAWDAQRIFKEAEKFFVSVGLPNMTQGFWENSMLTDPGNVQKAVCHPTAWDLGKGDFRILMCTKVTMDDFLTAHNEMGNIQYDMAYAAQPFLLRNGANEGFHEAVGEIMSLSAATPKHLKSIGLLSPDFQEDNETEINFLLKQALTIVGTLPFTYMLEKWRWMVFKGEIPKDQWMKKWWEMKREIVGVVEPVPHDETYCDPASLFHVSNDYSFIRYYTRTLYQFQFQEALCQAAKHEGPLHKCDISNSTEAGQKLFNMLRLGKSEPWTLALENVVGAKNMNVRPLLNYFEPLFTWLKDQNKNSFVGWSTDWSPYADQSIKVRISLKSALGDKAYEWNDNEMYLFRSSVAYAMRQYFLKVKNQMILFGEEDVRVANLKPRISFNFFVTAPKNVSDIIPRTEVEKAIRMSRSRINDAFRLNDNSLEFLGIQPTLGPPNQPPVSESKYGPPCPPCPAPEFLGGPSVFLFPPKPKDTLMISRTPEVTCVVVDVSQEDPEVQFNWYVDGVEVHNAKTKPREEQFNSTYRVVSVLTVLHQDWLNGKEYKCKVSNKGLPSSIEKTISKAKGQPREPQVYTLPPSQEEMTKNQVSLTCLVKGFYPSDIAVEWESNGQPENNYKTTPPVLDSDGSFFLYSRLTVDKSRWQEGNVFSCSVMHEALHNHYTQKSLSLSLGK

SEQ ID NO: 10 - protein, 942 aa, artificial
  fusion protein 5
QSTIEEQAKTFLDKFNHEAEDLFYQSSLASWNYNTNITEENVQNMNNAGDKWSAFLKEQSTLAQMYPLQEIQNLTVKLQLQALQQNGSSVLSEDKSKRLNTILNTMSTIYSTGKVCNPDNPQECLLLEPGLNEIMANSLDYNERLWAWESWRSEVGKQLRPLYEEYVVLKNEMARANHYEDYGDYWRGDYEVNGVDGYDYSRGQLIEDVEHTFEEIKPLYEHLHAYVRAKLMNAYPSYISPIGCLPAHLLGDMWGRFWTNLYSLTVPFGQKPNIDVTDAMVDQAWDAQRIFKEAEKFFVSVGLPNMTQGFWENSMLTDPGNVQKAVCHPTAWDLGKGDFRILMCTKVTMDDFLTAHHEMGHIQYDMAYAAQPFLLRNGANEGFHEAVGEIMSLSAATPKHLKSIGLLSPDFQEDNETEINFLLKQALTIVGTLPFTYMLEKWRWMVFKGEIPKDQWMKKWWEMKREIVGVVEPVPHDETYCDPASLFHVSNDYSFIRYYTRTLYQFQFQEALCQAAKHEGPLHKCDISNSTEAGQKLFNMLRLGKSEPWTLALENVVGAKNMNVRPLLNYFEPLFTWLKDQNKNSFVGWSTDWSPYADQSIKVRISLKSALGDKAYEWNDNEMYLFRSSVAYAMRQYFLKVKNQMILFGEEDVRVANLKPRISFNFFVTAPKNVSDIIPRTEVEKAIRMSRSRINDAFRLNDNSLEFLGIQPTLGDKTHTCPPCPAPELLGGPSVFLFPPKPKDTLMISRTPEVTCVVVDVSHEDPEVKFNWYVDGVEVHNAKTKPREEQYNSTYRVVSVLTVLHQDWLNGKEYKCKVSNKALPAPIEKTISKAKGQPREPQVYTLPPSRDELTKNQVSLTCLVKGFYPSDIAVEWESNGQPENNYKTTPPVLDSDGSFFLYSKLTVDKSRWQQGNVFSCSVMHEALHNHYTQKSLSLSPGK

SEQ ID NO: 11 - protein, 950 aa, artificial
  fusion protein 6
QSTIEEQAKTFLDKFNHEAEDLFYQSSLASWNYNTNITEENVQNMNNAGDKWSAFLKEQSTLAQMYPLQEIQNLTVKLQLQALQQNGSSVLSEDKSKRLNTILNTMSTIYSTGKVCNPDNPQECLLLEPGLNEIMANSLDYNERLWAWESWRSEVGKQLRPLYEEYVVLKNEMARANHYEDYGDYWRGDYEVNGVDGYDYSRGQLIEDVEHTFEEIKPLYEHLHAYVRAKLMNAYPSYISPIGCLPAHLLGDMWGRFWTNLYSLTVPFGQKPNIDVTDAMVDQAWDAQRIFKEAEKFFVSVGLPNMTQGFWENSMLTDPGNVQKAVCHPTAWDLGKGDFRILMCTKVTMDDFLTAHHEMGHIQYDMAYAAQPFLLRNGANEGFHEAVGEIMSLSAATPKHLKSIGLLSPDFQEDNETEINFLLKQALTIVGTLPFTYMLEKWRWMVFKGEIPKDQWMKKWWEMKREIVGVVEPVPHDETYCDPASLFHVSNDYSFIRYYTRTLYQFQFQEALCQAAKHEGPLHKCDISNSTEAGQKLFNMLRLGKSEPWTLALENVVGAKNMNVRPLLNYFEPLFTWLKDQNKNSFVGWSTDWSPYADQSIKVRISLKSALGDKAYEWNDNEMYLFRSSVAYAMRQYFLKVKNQMILFGEEDVRVANLKPRISFNFFVTAPKNVSDIIPRTEVEKAIRMSRSRINDAFRLNDNSLEFLGIQPTLGPPNQPPVSDKTHTCPPCPAPELLGGPSVFLFPPKPKDTLMISRTPEVTCVVVDVSHEDPEVKFNWYVDGVEVHNAKTKPREEQYNSTYRVVSVLTVLHQDWLNGKEYKCKVSNKALPAPIEKTISKAKGQPREPQVYTLPPSRDELTKNQVSLTCLVKGFYPSDIAVEWESNGQPENNYKTTPPVLDSDGSFFLYSKLTVDKSRWQQGNVFSCSVMHEALHNHYTQKSLSLSPGK

SEQ ID NO: 12 - protein, 942 aa, artificial
  fusion protein 7
QSTIEEQAKTFLDKFNHEAEDLFYQSSLASWNYNTNITEENVQNMNNAGDKWSAFLKEQSTLAQMYPLQEIQNLTVKLQLQALQQNGSSVLSEDKSKRLNTILNTMSTIYSTGKVCNPDNPQECLLLEPGLNEIMANSLDYNERLWAWESWRSEVGKQLRPLYEEYVVLKNEMARANHYEDYGDYWRGDYEVNGVDGYDYSRGQLIEDVEHTFEEIKPLYEHLHAYVRAKLMNAYPSYISPIGCLPAHLLGDMWGRFWTNLYSLTVPFGQKPNIDVTDAMVDQAWDAQRIFKEAEKFFVSVGLPNMTQGFWENSMLTDPGNVQKAVCHPTAWDLGKGDFRILMCTKVTMDDFLTAHNEMGNIQYDMAYAAQPFLLRNGANEGFHEAVGEIMSLSAATPKHLKSIGLLSPDFQEDNETEINFLLKQALTIVGTLPFTYMLEKWRWMVFKGEIPKDQWMKKWWEMKREIVGVVEPVPHDETYCDPASLFHVSNDYSFIRYYTRTLYQFQFQEALCQAAKHEGPLHKCDISNSTEAGQKLFNMLRLGKSEPWTLALENVVGAKNMNVRPLLNYFEPLFTWLKDQNKNSFVGWSTDWSPYADQSIKVRISLKSALGDKAYEWNDNEMYLFRSSVAYAMRQYFLKVKNQMILFGEEDVRVANLKPRISFNFFVTAPKNVSDIIPRTEVEKAIRMSRSRINDAFRLNDNSLEFLGIQPTLGDKTHTCPPCPAPELLGGPSVFLFPPKPKDTLMISRTPEVTCVVVDVSHEDPEVKFNWYVDGVEVHNAKTKPREEQYNSTYRVVSVLTVLHQDWLNGKEYKCKVSNKALPAPIEKTISKAKGQPREPQVYTLPPSRDELTKNQVSLTCLVKGFYPSDIAVEWESNGQPENNYKTTPPVLDSDGSFFLYSKLTVDKSRWQQGNVFSCSVMHEALHNHYTQKSLSLSPGK

SEQ ID NO: 13 - protein, 950 aa, artificial
  fusion protein 8
QSTIEEQAKTFLDKFNHEAEDLFYQSSLASWNYNTNITEENVQNMNNAGDKWSAFLKEQSTLAQMYPLQEIQNLTVKLQLQALQQNGSSVLSEDKSKRLNTILNTMSTIYSTGKVCNPDNPQECLLLEPGLNEIMANSLDYNERLWAWESWRSEVGKQLRPLYEEYVVLKNEMARANHYEDYGDYWRGDYEVNGVDGYDYSRGQLIEDVEHTFEEIKPLYEHLHAYVRAKLMNAYPSYISPIGCLPAHLLGDMWGRFWTNLYSLTVPFGQKPNIDVTDAMVDQAWDAQRIFKEAEKFFVSVGLPNMTQGFWENSMLTDPGNVQKAVCHPTAWDLGKGDFRILMCTKVTMDDFLTAHNEMGNIQYDMAYAAQPFLLRNGANEGFHEAVGEIMSLSAATPKHLKSIGLLSPDFQEDNETEINFLLKQALTIVGTLPFTYMLEKWRWMVFKGEIPKDQWMKKWWEMKREIVGVVEPVPHDETYCDPASLFHVSNDYSFIRYYTRTLYQFQFQEALCQAAKHEGPLHKCDISNSTEAGQKLFNMLRLGKSEPWTLALENVVGAKNMNVRPLLNYFEPLFTWLKDQNKNSFVGWSTDWSPYADQSIKVRISLKSALGDKAYEWNDNEMYLFRSSVAYAMRQYFLKVKNQMILFGEEDVRVANLKPRISFNFFVTAPKNVSDIIPRTEVEKAIRMSRSRINDAFRLNDNSLEFLGIQPTLGPPNQPPVSDKTHTCPPCPAPELLGGPSVFLFPPKPKDTLMISRTPEVTCVVVDVSHEDPEVKFNWYVDGVEVHNAKTKPREEQYNSTYRVVSVLTVLHQDWLNGKEYKCKVSNKALPAPIEKTISKAKGQPREPQVYTLPPSRDELTKNQVSLTCLVKGFYPSDIAVEWESNGQPENNYKTTPPVLDSDGSFFLYSKLTVDKSRWQQGNVFSCSVMHEALHNHYTQKSLSLSPGK

SEQ ID NO: 14 - protein, 588 aa, Homo sapiens
QSTIEEQAKTFLDKFNHEAEDLFYQSSLASWNYNTNITEENVQNMNNAGDKWSAFLKEQSTLAQMYPLQEIQNLTVKLQLQALQQNGSSVLSEDKSKRLNTILNTMSTIYSTGKVCNPDNPQECLLLEPGLNEIMANSLDYNERLWAWESWRSEVGKQLRPLYEEYVVLKNEMARANHYEDYGDYWRGDYEVNGVDGYDYSRGQLIEDVEHTFEEIKPLYEHLHAYVRAKLMNAYPSYISPIGCLPAHLLGDMWGRFWTNLYSLTVPFGQKPNIDVTDAMVDQAWDAQRIFKEAEKFFVSVGLPNMTQGFWENSMLTDPGNVQKAVCHPTAWDLGKGDFRILMCTKVTMDDFLTAHHEMGHIQYDMAYAAQPFLLRNGANEGFHEAVGEIMSLSAATPKHLKSIGLLSPDFQEDNETEINFLLKQALTIVGTLPFTYMLEKWRWMVFKGEIPKDQWMKKWWEMKREIVGVVEPVPHDETYCDPASLFHVSNDYSFIRYYTRTLYQFQFQEALCQAAKHEGPLHKCDISNSTEAGQKLFNMLRLGKSEPWTLALENVVGAKNMNVRPLLNYFEPLFTWLKDQNKNSFVG

SEQ ID NO: 15 - protein, 11 aa, human
DKTHTCPPCPA

SEQ ID NO: 16 - protein, 216 aa, Homo sapiens
PELLGGPSVFLFPPKPKDTLMISRTPEVTCVVVDVSHEDPEVKFNWYVDGVEVHNAKTKPREEQYNSTYRVVSVLTVLHQDWLNGKEYKCKVSNKALPAPIEKTISKAKGQPREPQVYTLPPSRDELTKNQVSLTCLVKGFYPSDIAVEWESNGQPENNYKTTPPVLDSDGSFFLYSKLTVDKSRWQQGNVFSCSVMHEALHNHYTQKSLSLSPGK

SEQ ID NO: 17 - protein, 18 aa, Homo sapiens
MKWVTFISLLFLFSSAYS

SEQ ID NO: 18 - protein, 1273 aa, SARS-CoV2
MFVFLVLLPLVSSQCVNLTTRTQLPPAYTNSFTRGVYYPDKVFRSSVLHSTQDLFLPFFSNVTWFHAIHVSGTNGTKRFDNPVLPFNDGVYFASTEKSNIIRGWIFGTTLDSKTQSLLIVNNATNVVIKVCEFQFCNDPFLGVYYHKNNKSWMESEFRVYSSANNCTFEYVSQPFLMDLEGKQGNFKNLREFVFKNIDGYFKIYSKHTPINLVRDLPQGFSALEPLVDLPIGINITRFQTLLALHRSYLTPGDSSSGWTAGAAAYYVGYLQPRTFLLKYNENGTITDAVDCALDPLSETKCTLKSFTVEKGIYQTSNFRVQPTESIVRFPNITNLCPFGEVFNATRFASVYAWNRKRISNCVADYSVLYNSASFSTFKCYGVSPTKLNDLCFTNVYADSFVIRGDEVRQIAPGQTGKIADYNYKLPDDFTGCVIAWNSNNLDSKVGGNYNYLYRLFRKSNLKPFERDISTEIYQAGSTPCNGVEGFNCYFPLQSYGFQPTNGVGYQPYRVVVLSFELLHAPATVCGPKKSTNLVKNKCVNFNFNGLTGTGVLTESNKKFLPFQQFGRDIADTTDAVRDPQTLEILDITPCSFGGVSVITPGTNTSNQVAVLYQDVNCTEVPVAIHADQLTPTWRVYSTGSNVFQTRAGCLIGAEHVNNSYECDIPIGAGICASYQTQTNSPRRARSVASQSIIAYTMSLGAENSVAYSNNSIAIPTNFTISVTTEILPVSMTKTSVDCTMYICGDSTECSNLLLQYGSFCTQLNRALTGIAVEQDKNTQEVFAQVKQIYKTPPIKDFGGFNFSQILPDPSKPSKRSFIEDLLFNKVTLADAGFIKQYGDCLGDIAARDLICAQKFNGLTVLPPLLTDEMIAQYTSALLAGTITSGWTFGAGAALQIPFAMQMAYRFNGIGVTQNVLYENQKLIANQFNSAIGKIQDSLSSTASALGKLQDVVNQNAQALNTLVKQLSSNFGAISSVLNDILSRLDKVEAEVQIDRLITGRLQSLQTYVTQQLIRAAEIRASANLAATKMSECVLGQSKRVDFCGKGYHLMSFPQSAPHGVVFLHVTYVPAQEKNFTTAPAICHDGKAHFPREGVFVSNGTHWFVTQRNFYEPQIITTDNTFVSGNCDVVIGIVNNTVYDPLQPELDSFKEELDKYFKNHTSPDVDLGDISGINASVVNIQKEIDRLNEVAKNLNESLIDLQELGKYEQYIKWPWYIWLGFIAGLIAIVMVTIMLCCMTSCCSCLKGCCSCGSCCKFDEDDSEPVLKGVKLHYT

SEQ ID NO: 19 - protein, 216 aa, artificial
  IgG1 mutant
PELLGGPSVFLFPPKPKDTLYITREPEVTCVVVDVSHEDPEVKFNWYVDGVEVHNAKTKPREEQYNSTYRVVSVLTVLHQDWLNGKEYKCKVSNKALPAPIEKTISKAKGQPREPQVYTLPPSRDELTKNQVSLTCLVKGFYPSDIAVEWESNGQPENNYKTTPPVLDSDGSFFLYSKLTVDKSRWQQGNVFSCSVMHEALHNHYTQKSLSLSPGK

SEQ ID NO: 20 - protein, 942 aa, artificial
  ACE2 18-732 with IgG1 YTE
QSTIEEQAKTFLDKFNHEAEDLFYQSSLASWNYNTNITEENVQNMNNAGDKWSAFLKEQSTLAQMYPLQEIQNLTVKLQLQALQQNGSSVLSEDKSKRLNTILNTMSTIYSTGKVCNPDNPQECLLLEPGLNEIMANSLDYNERLWAWESWRSEVGKQLRPLYEEYVVLKNEMARANHYEDYGDYWRGDYEVNGVDGYDYSRGQLIEDVEHTFEEIKPLYEHLHAYVRAKLMNAYPSYISPIGCLPAHLLGDMWGRFWTNLYSLTVPFGQKPNIDVTDAMVDQAWDAQRIFKEAEKFFVSVGLPNMTQGFWENSMLTDPGNVQKAVCHPTAWDLGKGDFRILMCTKVTMDDFLTAHHEMGHIQYDMAYAAQPFLLRNGANEGFHEAVGEIMSLSAATPKHLKSIGLLSPDFQEDNETEINFLLKQALTIVGTLPFTYMLEKWRWMVFKGEIPKDQWMKKWWEMKREIVGVVEPVPHDETYCDPASLFHVSNDYSFIRYYTRTLYQFQFQEALCQAAKHEGPLHKCDISNSTEAGQKLFNMLRLGKSEPWTLALENVVGAKNMNVRPLLNYFEPLFTWLKDQNKNSFVGWSTDWSPYADQSIKVRISLKSALGDKAYEWNDNEMYLFRSSVAYAMRQYFLKVKNQMILFGEEDVRVANLKPRISFNFFVTAPKNVSDIIPRTEVEKAIRMSRSRINDAFRLNDNSLEFLGIQPTLGDKTHTCPPCPAPELLGGPSVFLFPPKPKDTLYITREPEVTCVVVDVSHEDPEVKFNWYVDGVEVHNAKTKPREEQYNSTYRVVSVLTVLHQDWLNGKEYKCKVSNKALPAPIEKTISKAKGQPREPQVYTLPPSRDELTKNQVSLTCLVKGFYPSDIAVEWESNGQPENNYKTTPPVLDSDGSFFLYSKLTVDKSRWQQGNVFSCSVMHEALHNHYTQKSLSLSPGK

SEQ ID NO: 21 - protein, 950 aa, artificial
  ACE2 18-740 with IgG1 YTE
QSTIEEQAKTFLDKFNHEAEDLFYQSSLASWNYNTNITEENVQNMNNAGDKWSAFLKEQSTLAQMYPLQEIQNLTVKLQLQALQQNGSSVLSEDKSKRLNTILNTMSTIYSTGKVCNPDNPQECLLLEPGLNEIMANSLDYNERLWAWESWRSEVGKQLRPLYEEYVVLKNEMARANHYEDYGDYWRGDYEVNGVDGYDYSRGQLIEDVEHTFEEIKPLYEHLHAYVRAKLMNAYPSYISPIGCLPAHLLGDMWGRFWTNLYSLTVPFGQKPNIDVTDAMVDQAWDAQRIFKEAEKFFVSVGLPNMTQGFWENSMLTDPGNVQKAVCHPTAWDLGKGDFRILMCTKVTMDDFLTAHHEMGHIQYDMAYAAQPFLLRNGANEGFHEAVGEIMSLSAATPKHLKSIGLLSPDFQEDNETEINFLLKQALTIVGTLPFTYMLEKWRWMVFKGEIPKDQWMKKWWEMKREIVGVVEPVPHDETYCDPASLFHVSNDYSFIRYYTRTLYQFQFQEALCQAAKHEGPLHKCDISNSTEAGQKLFNMLRLGKSEPWTLALENVVGAKNMNVRPLLNYFEPLFTWLKDQNKNSFVGWSTDWSPYADQSIKVRISLKSALGDKAYEWNDNEMYLFRSSVAYAMRQYFLKVKNQMILFGEEDVRVANLKPRISFNFFVTAPKNVSDIIPRTEVEKAIRMSRSRINDAFRLNDNSLEFLGIQPTLGPPNQPPVSDKTHTCPPCPAPELLGGPSVFLFPPKPKDTLYITREPEVTCVVVDVSHEDPEVKFNWYVDGVEVHNAKTKPREEQYNSTYRVVSVLTVLHQDWLNGKEYKCKVSNKALPAPIEKTISKAKGQPREPQVYTLPPSRDELTKNQVSLTCLVKGFYPSDIAVEWESNGQPENNYKTTPPVLDSDGSFFLYSKLTVDKSRWQQGNVFSCSVMHEALHNHYTQKSLSLSPGK

SEQ ID NO: 22 - protein, 942 aa, artificial
  ACE2 18-732 (H374N+H378N) with IgG1 YTE
QSTIEEQAKTFLDKFNHEAEDLFYQSSLASWNYNTNITEENVQNMNNAGDKWSAFLKEQSTLAQMYPLQEIQNLTVKLQLQALQQNGSSVLSEDKSKRLNTILNTMSTIYSTGKVCNPDNPQECLLLEPGLNEIMANSLDYNERLWAWESWRSEVGKQLRPLYEEYVVLKNEMARANHYEDYGDYWRGDYEVNGVDGYDYSRGQLIEDVEHTFEEIKPLYEHLHAYVRAKLMNAYPSYISPIGCLPAHLLGDMWGRFWTNLYSLTVPFGQKPNIDVTDAMVDQAWDAQRIFKEAEKFFVSVGLPNMTQGFWENSMLTDPGNVQKAVCHPTAWDLGKGDFRILMCTKVTMDDFLTAHNEMGNIQYDMAYAAQPFLLRNGANEGFHEAVGEIMSLSAATPKHLKSIGLLSPDFQEDNETEINFLLKQALTIVGTLPFTYMLEKWRWMVFKGEIPKDQWMKKWWEMKREIVGVVEPVPHDETYCDPASLFHVSNDYSFIRYYTRTLYQFQFQEALCQAAKHEGPLHKCDISNSTEAGQKLFNMLRLGKSEPWTLALENVVGAKNMNVRPLLNYFEPLFTWLKDQNKNSFVGWSTDWSPYADQSIKVRISLKSALGDKAYEWNDNEMYLFRSSVAYAMRQYFLKVKNQMILFGEEDVRVANLKPRISFNFFVTAPKNVSDIIPRTEVEKAIRMSRSRINDAFRLNDNSLEFLGIQPTLGDKTHTCPPCPAPELLGGPSVFLFPPKPKDTLYITREPEVTCVVVDVSHEDPEVKFNWYVDGVEVHNAKTKPREEQYNSTYRVVSVLTVLHQDWLNGKEYKCKVSNKALPAPIEKTISKAKGQPREPQVYTLPPSRDELTKNQVSLTCLVKGFYPSDIAVEWESNGQPENNYKTTPPVLDSDGSFFLYSKLTVDKSRWQQGNVFSCSVMHEALHNHYTQKSLSLSPGK

SEQ ID NO: 23 - protein, 950 aa, artificial
  ACE2 18-740 H374N+H378N with IgG1 YTE
QSTIEEQAKTFLDKFNHEAEDLFYQSSLASWNYNTNITEENVQNMNNAGDKWSAFLKEQSTLAQMYPLQEIQNLTVKLQLQALQQNGSSVLSEDKSKRLNTILNTMSTIYSTGKVCNPDNPQECLLLEPGLNEIMANSLDYNERLWAWESWRSEVGKQLRPLYEEYVVLKNEMARANHYEDYGDYWRGDYEVNGVDGYDYSRGQLIEDVEHTFEEIKPLYEHLHAYVRAKLMNAYPSYISPIGCLPAHLLGDMWGRFWTNLYSLTVPFGQKPNIDVTDAMVDQAWDAQRIFKEAEKFFVSVGLPNMTQGFWENSMLTDPGNVQKAVCHPTAWDLGKGDFRILMCTKVTMDDFLTAHNEMGNIQYDMAYAAQPFLLRNGANEGFHEAVGEIMSLSAATPKHLKSIGLLSPDFQEDNETEINFLLKQALTIVGTLPFTYMLEKWRWMVFKGEIPKDQWMKKWWEMKREIVGVVEPVPHDETYCDPASLFHVSNDYSFIRYYTRTLYQFQFQEALCQAAKHEGPLHKCDISNSTEAGQKLFNMLRLGKSEPWTLALENVVGAKNMNVRPLLNYFEPLFTWLKDQNKNSFVGWSTDWSPYADQSIKVRISLKSALGDKAYEWNDNEMYLFRSSVAYAMRQYFLKVKNQMILFGEEDVRVANLKPRISFNFFVTAPKNVSDIIPRTEVEKAIRMSRSRINDAFRLNDNSLEFLGIQPTLGPPNQPPVSDKTHTCPPCPAPELLGGPSVFLFPPKPKDTLYITREPEVTCVVVDVSHEDPEVKFNWYVDGVEVHNAKTKPREEQYNSTYRVVSVLTVLHQDWLNGKEYKCKVSNKALPAPIEKTISKAKGQPREPQVYTLPPSRDELTKNQVSLTCLVKGFYPSDIAVEWESNGQPENNYKTTPPVLDSDGSFFLYSKLTVDKSRWQQGNVFSCSVMHEALHNHYTQKSLSLSPGK

SEQ ID NO: 24 - protein, 715 aa, artificial
  ACE2 18-732 R273A
QSTIEEQAKTFLDKFNHEAEDLFYQSSLASWNYNTNITEENVQNMNNAGDKWSAFLKEQSTLAQMYPLQEIQNLTVKLQLQALQQNGSSVLSEDKSKRLNTILNTMSTIYSTGKVCNPDNPQECLLLEPGLNEIMANSLDYNERLWAWESWRSEVGKQLRPLYEEYVVLKNEMARANHYEDYGDYWRGDYEVNGVDGYDYSRGQLIEDVEHTFEEIKPLYEHLHAYVRAKLMNAYPSYISPIGCLPAHLLGDMWGAFWTNLYSLTVPFGQKPNIDVTDAMVDQAWDAQRIFKEAEKFFVSVGLPNMTQGFWENSMLTDPGNVQKAVCHPTAWDLGKGDFRILMCTKVTMDDFLTAHHEMGHIQYDMAYAAQPFLLRNGANEGFHEAVGEIMSLSAATPKHLKSIGLLSPDFQEDNETEINFLLKQALTIVGTLPFTYMLEKWRWMVFKGEIPKDQWMKKWWEMKREIVGVVEPVPHDETYCDPASLFHVSNDYSFIRYYTRTLYQFQFQEALCQAAKHEGPLHKCDISNSTEAGQKLFNMLRLGKSEPWTLALENVVGAKNMNVRPLLNYFEPLFTWLKDQNKNSFVGWSTDWSPYADQSIKVRISLKSALGDKAYEWNDNEMYLFRSSVAYAMRQYFLKVKNQMILFGEEDVRVANLKPRISFNFFVTAPKNVSDIIPRTEVEKAIRMSRSRINDAFRLNDNSLEFLGIQPTLG

SEQ ID NO: 25 - protein, 723 aa, artificial
  ACE2 18-740 R273A
QSTIEEQAKTFLDKFNHEAEDLFYQSSLASWNYNTNITEENVQNMNNAGDKWSAFLKEQSTLAQMYPLQEIQNLTVKLQLQALQQNGSSVLSEDKSKRLNTILNTMSTIYSTGKVCNPDNPQECLLLEPGLNEIMANSLDYNERLWAWESWRSEVGKQLRPLYEEYVVLKNEMARANHYEDYGDYWRGDYEVNGVDGYDYSRGQLIEDVEHTFEEIKPLYEHLHAYVRAKLMNAYPSYISPIGCLPAHLLGDMWGAFWTNLYSLTVPFGQKPNIDVTDAMVDQAWDAQRIFKEAEKFFVSVGLPNMTQGFWENSMLTDPGNVQKAVCHPTAWDLGKGDFRILMCTKVTMDDFLTAHHEMGHIQYDMAYAAQPFLLRNGANEGFHEAVGEIMSLSAATPKHLKSIGLLSPDFQEDNETEINFLLKQALTIVGTLPFTYMLEKWRWMVFKGEIPKDQWMKKWWEMKREIVGVVEPVPHDETYCDPASLFHVSNDYSFIRYYTRTLYQFQFQEALCQAAKHEGPLHKCDISNSTEAGQKLFNMLRLGKSEPWTLALENVVGAKNMNVRPLLNYFEPLFTWLKDQNKNSFVGWSTDWSPYADQSIKVRISLKSALGDKAYEWNDNEMYLFRSSVAYAMRQYFLKVKNQMILFGEEDVRVANLKPRISFNFFVTAPKNVSDIIPRTEVEKAIRMSRSRINDAFRLNDNSLEFLGIQPTLGPPNQPPVS

SEQ ID NO: 26 - protein, 942 aa, artificial
  ACE2 18-732 R273A with IgG1 YTE
QSTIEEQAKTFLDKFNHEAEDLFYQSSLASWNYNTNITEENVQNMNNAGDKWSAFLKEQSTLAQMYPLQEIQNLTVKLQLQALQQNGSSVLSEDKSKRLNTILNTMSTIYSTGKVCNPDNPQECLLLEPGLNEIMANSLDYNERLWAWESWRSEVGKQLRPLYEEYVVLKNEMARANHYEDYGDYWRGDYEVNGVDGYDYSRGQLIEDVEHTFEEIKPLYEHLHAYVRAKLMNAYPSYISPIGCLPAHLLGDMWGAFWTNLYSLTVPFGQKPNIDVTDAMVDQAWDAQRIFKEAEKFFVSVGLPNMTQGFWENSMLTDPGNVQKAVCHPTAWDLGKGDFRILMCTKVTMDDFLTAHHEMGHIQYDMAYAAQPFLLRNGANEGFHEAVGEIMSLSAATPKHLKSIGLLSPDFQEDNETEINFLLKQALTIVGTLPFTYMLEKWRWMVFKGEIPKDQWMKKWWEMKREIVGVVEPVPHDETYCDPASLFHVSNDYSFIRYYTRTLYQFQFQEALCQAAKHEGPLHKCDISNSTEAGQKLFNMLRLGKSEPWTLALENVVGAKNMNVRPLLNYFEPLFTWLKDQNKNSFVGWSTDWSPYADQSIKVRISLKSALGDKAYEWNDNEMYLFRSSVAYAMRQYFLKVKNQMILFGEEDVRVANLKPRISFNFFVTAPKNVSDIIPRTEVEKAIRMSRSRINDAFRLNDNSLEFLGIQPTLGDKTHTCPPCPAPELLGGPSVFLFPPKPKDTLYITREPEVTCVVVDVSHEDPEVKFNWYVDGVEVHNAKTKPREEQYNSTYRVVSVLTVLHQDWLNGKEYKCKVSNKALPAPIEKTISKAKGQPREPQVYTLPPSRDELTKNQVSLTCLVKGFYPSDIAVEWESNGQPENNYKTTPPVLDSDGSFFLYSKLTVDKSRWQQGNVFSCSVMHEALHNHYTQKSLSLSPGK

SEQ ID NO: 27 - protein, 950 aa, artificial
  ACE2 18-740 R273 A with IgG1 YTE
QSTIEEQAKTFLDKFNHEAEDLFYQSSLASWNYNTNITEENVQNMNNAGDKWSAFLKEQSTLAQMYPLQEIQNLTVKLQLQALQQNGSSVLSEDKSKRLNTILNTMSTIYSTGKVCNPDNPQECLLLEPGLNEIMANSLDYNERLWAWESWRSEVGKQLRPLYEEYVVLKNEMARANHYEDYGDYWRGDYEVNGVDGYDYSRGQLIEDVEHTFEEIKPLYEHLHAYVRAKLMNAYPSYISPIGCLPAHLLGDMWGAFWTNLYSLTVPFGQKPNIDVTDAMVDQAWDAQRIFKEAEKFFVSVGLPNMTQGFWENSMLTDPGNVQKAVCHPTAWDLGKGDFRILMCTKVTMDDFLTAHHEMGHIQYDMAYAAQPFLLRNGANEGFHEAVGEIMSLSAATPKHLKSIGLLSPDFQEDNETEINFLLKQALTIVGTLPFTYMLEKWRWMVFKGEIPKDQWMKKWWEMKREIVGVVEPVPHDETYCDPASLFHVSNDYSFIRYYTRTLYQFQFQEALCQAAKHEGPLHKCDISNSTEAGQKLFNMLRLGKSEPWTLALENVVGAKNMNVRPLLNYFEPLFTWLKDQNKNSFVGWSTDWSPYADQSIKVRISLKSALGDKAYEWNDNEMYLFRSSVAYAMRQYFLKVKNQMILFGEEDVRVANLKPRISFNFFVTAPKNVSDIIPRTEVEKAIRMSRSRINDAFRLNDNSLEFLGIQPTLGPPNQPPVSDKTHTCPPCPAPELLGGPSVFLFPPKPKDTLYITREPEVTCVVVDVSHEDPEVKFNWYVDGVEVHNAKTKPREEQYNSTYRVVSVLTVLHQDWLNGKEYKCKVSNKALPAPIEKTISKAKGQPREPQVYTLPPSRDELTKNQVSLTCLVKGFYPSDIAVEWESNGQPENNYKTTPPVLDSDGSFFLYSKLTVDKSRWQQGNVFSCSVMHEALHNHYTQKSLSLSPGK

SEQ ID NO: 28 - protein, 715 aa, artificial
  ACE2 18-732 S645C
QSTIEEQAKTFLDKFNHEAEDLFYQSSLASWNYNTNITEENVQNMNNAGDKWSAFLKEQSTLAQMYPLQEIQNLTVKLQLQALQQNGSSVLSEDKSKRLNTILNTMSTIYSTGKVCNPDNPQECLLLEPGLNEIMANSLDYNERLWAWESWRSEVGKQLRPLYEEYVVLKNEMARANHYEDYGDYWRGDYEVNGVDGYDYSRGQLIEDVEHTFEEIKPLYEHLHAYVRAKLMNAYPSYISPIGCLPAHLLGDMWGRFWTNLYSLTVPFGQKPNIDVTDAMVDQAWDAQRIFKEAEKFFVSVGLPNMTQGFWENSMLTDPGNVQKAVCHPTAWDLGKGDFRILMCTKVTMDDFLTAHHEMGHIQYDMAYAAQPFLLRNGANEGFHEAVGEIMSLSAATPKHLKSIGLLSPDFQEDNETEINFLLKQALTIVGTLPFTYMLEKWRWMVFKGEIPKDQWMKKWWEMKREIVGVVEPVPHDETYCDPASLFHVSNDYSFIRYYTRTLYQFQFQEALCQAAKHEGPLHKCDISNSTEAGQKLFNMLRLGKSEPWTLALENVVGAKNMNVRPLLNYFEPLFTWLKDQNKNSFVGWSTDWSPYADQSIKVRISLKSALGDKAYEWNDNEMYLFRCSVAYAMRQYFLKVKNQMILFGEEDVRVANLKPRISFNFFVTAPKNVSDIIPRTEVEKAIRMSRSRINDAFRLNDNSLEFLGIQPTLG

SEQ ID NO: 29 - protein, 723 aa, artificial
  ACE2 18-740 S645C
QSTIEEQAKTFLDKFNHEAEDLFYQSSLASWNYNTNITEENVQNMNNAGDKWSAFLKEQSTLAQMYPLQEIQNLTVKLQLQALQQNGSSVLSEDKSKRLNTILNTMSTIYSTGKVCNPDNPQECLLLEPGLNEIMANSLDYNERLWAWESWRSEVGKQLRPLYEEYVVLKNEMARANHYEDYGDYWRGDYEVNGVDGYDYSRGQLIEDVEHTFEEIKPLYEHLHAYVRAKLMNAYPSYISPIGCLPAHLLGDMWGRFWTNLYSLTVPFGQKPNIDVTDAMVDQAWDAQRIFKEAEKFFVSVGLPNMTQGFWENSMLTDPGNVQKAVCHPTAWDLGKGDFRILMCTKVTMDDFLTAHHEMGHIQYDMAYAAQPFLLRNGANEGFHEAVGEIMSLSAATPKHLKSIGLLSPDFQEDNETEINFLLKQALTIVGTLPFTYMLEKWRWMVFKGEIPKDQWMKKWWEMKREIVGVVEPVPHDETYCDPASLFHVSNDYSFIRYYTRTLYQFQFQEALCQAAKHEGPLHKCDISNSTEAGQKLFNMLRLGKSEPWTLALENVVGAKNMNVRPLLNYFEPLFTWLKDQNKNSFVGWSTDWSPYADQSIKVRISLKSALGDKAYEWNDNEMYLFRCSVAYAMRQYFLKVKNQMILFGEEDVRVANLKPRISFNFFVTAPKNVSDIIPRTEVEKAIRMSRSRINDAFRLNDNSLEFLGIQPTLGPPNQPPVS

SEQ ID NO: 30 - protein, 942 aa, artificial
  ACE2 18-732 S645C with IgG1 YTE
QSTIEEQAKTFLDKFNHEAEDLFYQSSLASWNYNTNITEENVQNMNNAGDKWSAFLKEQSTLAQMYPLQEIQNLTVKLQLQALQQNGSSVLSEDKSKRLNTILNTMSTIYSTGKVCNPDNPQECLLLEPGLNEIMANSLDYNERLWAWESWRSEVGKQLRPLYEEYVVLKNEMARANHYEDYGDYWRGDYEVNGVDGYDYSRGQLIEDVEHTFEEIKPLYEHLHAYVRAKLMNAYPSYISPIGCLPAHLLGDMWGRFWTNLYSLTVPFGQKPNIDVTDAMVDQAWDAQRIFKEAEKFFVSVGLPNMTQGFWENSMLTDPGNVQKAVCHPTAWDLGKGDFRILMCTKVTMDDFLTAHHEMGHIQYDMAYAAQPFLLRNGANEGFHEAVGEIMSLSAATPKHLKSIGLLSPDFQEDNETEINFLLKQALTIVGTLPFTYMLEKWRWMVFKGEIPKDQWMKKWWEMKREIVGVVEPVPHDETYCDPASLFHVSNDYSFIRYYTRTLYQFQFQEALCQAAKHEGPLHKCDISNSTEAGQKLFNMLRLGKSEPWTLALENVVGAKNMNVRPLLNYFEPLFTWLKDQNKNSFVGWSTDWSPYADQSIKVRISLKSALGDKAYEWNDNEMYLFRCSVAYAMRQYFLKVKNQMILFGEEDVRVANLKPRISFNFFVTAPKNVSDIIPRTEVEKAIRMSRSRINDAFRLNDNSLEFLGIQPTLGDKTHTCPPCPAPELLGGPSVFLFPPKPKDTLYITREPEVTCVVVDVSHEDPEVKFNWYVDGVEVHNAKTKPREEQYNSTYRVVSVLTVLHQDWLNGKEYKCKVSNKALPAPIEKTISKAKGQPREPQVYTLPPSRDELTKNQVSLTCLVKGFYPSDIAVEWESNGQPENNYKTTPPVLDSDGSFFLYSKLTVDKSRWQQGNVFSCSVMHEALHNHYTQKSLSLSPGK

SEQ ID NO: 31 - protein, 950 aa, artificial
  ACE2 18-740 S645C with IgG1 YTE
QSTIEEQAKTFLDKFNHEAEDLFYQSSLASWNYNTNITEENVQNMNNAGDKWSAFLKEQSTLAQMYPLQEIQNLTVKLQLQALQQNGSSVLSEDKSKRLNTILNTMSTIYSTGKVCNPDNPQECLLLEPGLNEIMANSLDYNERLWAWESWRSEVGKQLRPLYEEYVVLKNEMARANHYEDYGDYWRGDYEVNGVDGYDYSRGQLIEDVEHTFEEIKPLYEHLHAYVRAKLMNAYPSYISPIGCLPAHLLGDMWGRFWTNLYSLTVPFGQKPNIDVTDAMVDQAWDAQRIFKEAEKFFVSVGLPNMTQGFWENSMLTDPGNVQKAVCHPTAWDLGKGDFRILMCTKVTMDDFLTAHHEMGHIQYDMAYAAQPFLLRNGANEGFHEAVGEIMSLSAATPKHLKSIGLLSPDFQEDNETEINFLLKQALTIVGTLPFTYMLEKWRWMVFKGEIPKDQWMKKWWEMKREIVGVVEPVPHDETYCDPASLFHVSNDYSFIRYYTRTLYQFQFQEALCQAAKHEGPLHKCDISNSTEAGQKLFNMLRLGKSEPWTLALENVVGAKNMNVRPLLNYFEPLFTWLKDQNKNSFVGWSTDWSPYADQSIKVRISLKSALGDKAYEWNDNEMYLFRCSVAYAMRQYFLKVKNQMILFGEEDVRVANLKPRISFNFFVTAPKNVSDIIPRTEVEKAIRMSRSRINDAFRLNDNSLEFLGIQPTLGPPNQPPVSDKTHTCPPCPAPELLGGPSVFLFPPKPKDTLYITREPEVTCVVVDVSHEDPEVKFNWYVDGVEVHNAKTKPREEQYNSTYRVVSVLTVLHQDWLNGKEYKCKVSNKALPAPIEKTISKAKGQPREPQVYTLPPSRDELTKNQVSLTCLVKGFYPSDIAVEWESNGQPENNYKTTPPVLDSDGSFFLYSKLTVDKSRWQQGNVFSCSVMHEALHNHYTQKSLSLSPGK

SEQ ID NO: 32 - protein, 715 aa, artificial
  ACE2 18-732 S645C+H374N+H378N
QSTIEEQAKTFLDKFNHEAEDLFYQSSLASWNYNTNITEENVQNMNNAGDKWSAFLKEQSTLAQMYPLQEIQNLTVKLQLQALQQNGSSVLSEDKSKRLNTILNTMSTIYSTGKVCNPDNPQECLLLEPGLNEIMANSLDYNERLWAWESWRSEVGKQLRPLYEEYVVLKNEMARANHYEDYGDYWRGDYEVNGVDGYDYSRGQLIEDVEHTFEEIKPLYEHLHAYVRAKLMNAYPSYISPIGCLPAHLLGDMWGRFWTNLYSLTVPFGQKPNIDVTDAMVDQAWDAQRIFKEAEKFFVSVGLPNMTQGFWENSMLTDPGNVQKAVCHPTAWDLGKGDFRILMCTKVTMDDFLTAHNEMGNIQYDMAYAAQPFLLRNGANEGFHEAVGEIMSLSAATPKHLKSIGLLSPDFQEDNETEINFLLKQALTIVGTLPFTYMLEKWRWMVFKGEIPKDQWMKKWWEMKREIVGVVEPVPHDETYCDPASLFHVSNDYSFIRYYTRTLYQFQFQEALCQAAKHEGPLHKCDISNSTEAGQKLFNMLRLGKSEPWTLALENVVGAKNMNVRPLLNYFEPLFTWLKDQNKNSFVGWSTDWSPYADQSIKVRISLKSALGDKAYEWNDNEMYLFRCSVAYAMRQYFLKVKNQMILFGEEDVRVANLKPRISFNFFVTAPKNVSDIIPRTEVEKAIRMSRSRINDAFRLNDNSLEFLGIQPTLG

SEQ ID NO: 33 - protein, 723 aa, artificial
  ACE2 18-740 S645C+H374N+H378N
QSTIEEQAKTFLDKFNHEAEDLFYQSSLASWNYNTNITEENVQNMNNAGDKWSAFLKEQSTLAQMYPLQEIQNLTVKLQLQALQQNGSSVLSEDKSKRLNTILNTMSTIYSTGKVCNPDNPQECLLLEPGLNEIMANSLDYNERLWAWESWRSEVGKQLRPLYEEYVVLKNEMARANHYEDYGDYWRGDYEVNGVDGYDYSRGQLIEDVEHTFEEIKPLYEHLHAYVRAKLMNAYPSYISPIGCLPAHLLGDMWGRFWTNLYSLTVPFGQKPNIDVTDAMVDQAWDAQRIFKEAEKFFVSVGLPNMTQGFWENSMLTDPGNVQKAVCHPTAWDLGKGDFRILMCTKVTMDDFLTAHNEMGNIQYDMAYAAQPFLLRNGANEGFHEAVGEIMSLSAATPKHLKSIGLLSPDFQEDNETEINFLLKQALTIVGTLPFTYMLEKWRWMVFKGEIPKDQWMKKWWEMKREIVGVVEPVPHDETYCDPASLFHVSNDYSFIRYYTRTLYQFQFQEALCQAAKHEGPLHKCDISNSTEAGQKLFNMLRLGKSEPWTLALENVVGAKNMNVRPLLNYFEPLFTWLKDQNKNSFVGWSTDWSPYADQSIKVRISLKSALGDKAYEWNDNEMYLFRCSVAYAMRQYFLKVKNQMILFGEEDVRVANLKPRISFNFFVTAPKNVSDIIPRTEVEKAIRMSRSRINDAFRLNDNSLEFLGIQPTLGPPNQPPVS

SEQ ID NO: 34 - protein, 942 aa, artificial
  ACE2 18-732 S645C+H374N+H378N with IgG1 YTE
QSTIEEQAKTFLDKFNHEAEDLFYQSSLASWNYNTNITEENVQNMNNAGDKWSAFLKEQSTLAQMYPLQEIQNLTVKLQLQALQQNGSSVLSEDKSKRLNTILNTMSTIYSTGKVCNPDNPQECLLLEPGLNEIMANSLDYNERLWAWESWRSEVGKQLRPLYEEYVVLKNEMARANHYEDYGDYWRGDYEVNGVDGYDYSRGQLIEDVEHTFEEIKPLYEHLHAYVRAKLMNAYPSYISPIGCLPAHLLGDMWGRFWTNLYSLTVPFGQKPNIDVTDAMVDQAWDAQRIFKEAEKFFVSVGLPNMTQGFWENSMLTDPGNVQKAVCHPTAWDLGKGDFRILMCTKVTMDDFLTAHNEMGNIQYDMAYAAQPFLLRNGANEGFHEAVGEIMSLSAATPKHLKSIGLLSPDFQEDNETEINFLLKQALTIVGTLPFTYMLEKWRWMVFKGEIPKDQWMKKWWEMKREIVGVVEPVPHDETYCDPASLFHVSNDYSFIRYYTRTLYQFQFQEALCQAAKHEGPLHKCDISNSTEAGQKLFNMLRLGKSEPWTLALENVVGAKNMNVRPLLNYFEPLFTWLKDQNKNSFVGWSTDWSPYADQSIKVRISLKSALGDKAYEWNDNEMYLFRCSVAYAMRQYFLKVKNQMILFGEEDVRVANLKPRISFNFFVTAPKNVSDIIPRTEVEKAIRMSRSRINDAFRLNDNSLEFLGIQPTLGDKTHTCPPCPAPELLGGPSVFLFPPKPKDTLYITREPEVTCVVVDVSHEDPEVKFNWYVDGVEVHNAKTKPREEQYNSTYRVVSVLTVLHQDWLNGKEYKCKVSNKALPAPIEKTISKAKGQPREPQVYTLPPSRDELTKNQVSLTCLVKGFYPSDIAVEWESNGQPENNYKTTPPVLDSDGSFFLYSKLTVDKSRWQQGNVFSCSVMHEALHNHYTQKSLSLSPGK

SEQ ID NO: 35 - protein, 950 aa, artificial
  ACE2 18-740 S645C+H374N+H378N with IgG1 YTE
QSTIEEQAKTFLDKFNHEAEDLFYQSSLASWNYNTNITEENVQNMNNAGDKWSAFLKEQSTLAQMYPLQEIQNLTVKLQLQALQQNGSSVLSEDKSKRLNTILNTMSTIYSTGKVCNPDNPQECLLLEPGLNEIMANSLDYNERLWAWESWRSEVGKQLRPLYEEYVVLKNEMARANHYEDYGDYWRGDYEVNGVDGYDYSRGQLIEDVEHTFEEIKPLYEHLHAYVRAKLMNAYPSYISPIGCLPAHLLGDMWGRFWTNLYSLTVPFGQKPNIDVTDAMVDQAWDAQRIFKEAEKFFVSVGLPNMTQGFWENSMLTDPGNVQKAVCHPTAWDLGKGDFRILMCTKVTMDDFLTAHNEMGNIQYDMAYAAQPFLLRNGANEGFHEAVGEIMSLSAATPKHLKSIGLLSPDFQEDNETEINFLLKQALTIVGTLPFTYMLEKWRWMVFKGEIPKDQWMKKWWEMKREIVGVVEPVPHDETYCDPASLFHVSNDYSFIRYYTRTLYQFQFQEALCQAAKHEGPLHKCDISNSTEAGQKLFNMLRLGKSEPWTLALENVVGAKNMNVRPLLNYFEPLFTWLKDQNKNSFVGWSTDWSPYADQSIKVRISLKSALGDKAYEWNDNEMYLFRCSVAYAMRQYFLKVKNQMILFGEEDVRVANLKPRISFNFFVTAPKNVSDIIPRTEVEKAIRMSRSRINDAFRLNDNSLEFLGIQPTLGPPNQPPVSDKTHTCPPCPAPELLGGPSVFLFPPKPKDTLYITREPEVTCVVVDVSHEDPEVKFNWYVDGVEVHNAKTKPREEQYNSTYRVVSVLTVLHQDWLNGKEYKCKVSNKALPAPIEKTISKAKGQPREPQVYTLPPSRDELTKNQVSLTCLVKGFYPSDIAVEWESNGQPENNYKTTPPVLDSDGSFFLYSKLTVDKSRWQQGNVFSCSVMHEALHNHYTQKSLSLSPGK

SEQ ID NO: 36 - protein, 715 aa, artificial
  ACE2 18-732 S645C+R273A
QSTIEEQAKTFLDKFNHEAEDLFYQSSLASWNYNTNITEENVQNMNNAGDKWSAFLKEQSTLAQMYPLQEIQNLTVKLQLQALQQNGSSVLSEDKSKRLNTILNTMSTIYSTGKVCNPDNPQECLLLEPGLNEIMANSLDYNERLWAWESWRSEVGKQLRPLYEEYVVLKNEMARANHYEDYGDYWRGDYEVNGVDGYDYSRGQLIEDVEHTFEEIKPLYEHLHAYVRAKLMNAYPSYISPIGCLPAHLLGDMWGAFWTNLYSLTVPFGQKPNIDVTDAMVDQAWDAQRIFKEAEKFFVSVGLPNMTQGFWENSMLTDPGNVQKAVCHPTAWDLGKGDFRILMCTKVTMDDFLTAHHEMGHIQYDMAYAAQPFLLRNGANEGFHEAVGEIMSLSAATPKHLKSIGLLSPDFQEDNETEINFLLKQALTIVGTLPFTYMLEKWRWMVFKGEIPKDQWMKKWWEMKREIVGVVEPVPHDETYCDPASLFHVSNDYSFIRYYTRTLYQFQFQEALCQAAKHEGPLHKCDISNSTEAGQKLFNMLRLGKSEPWTLALENVVGAKNMNVRPLLNYFEPLFTWLKDQNKNSFVGWSTDWSPYADQSIKVRISLKSALGDKAYEWNDNEMYLFRCSVAYAMRQYFLKVKNQMILFGEEDVRVANLKPRISFNFFVTAPKNVSDIIPRTEVEKAIRMSRSRINDAFRLNDNSLEFLGIQPTLG

SEQ ID NO: 37 - protein, 723 aa, artificial
  ACE2 18-740 S645C+R273A
QSTIEEQAKTFLDKFNHEAEDLFYQSSLASWNYNTNITEENVQNMNNAGDKWSAFLKEQSTLAQMYPLQEIQNLTVKLQLQALQQNGSSVLSEDKSKRLNTILNTMSTIYSTGKVCNPDNPQECLLLEPGLNEIMANSLDYNERLWAWESWRSEVGKQLRPLYEEYVVLKNEMARANHYEDYGDYWRGDYEVNGVDGYDYSRGQLIEDVEHTFEEIKPLYEHLHAYVRAKLMNAYPSYISPIGCLPAHLLGDMWGAFWTNLYSLTVPFGQKPNIDVTDAMVDQAWDAQRIFKEAEKFFVSVGLPNMTQGFWENSMLTDPGNVQKAVCHPTAWDLGKGDFRILMCTKVTMDDFLTAHHEMGHIQYDMAYAAQPFLLRNGANEGFHEAVGEIMSLSAATPKHLKSIGLLSPDFQEDNETEINFLLKQALTIVGTLPFTYMLEKWRWMVFKGEIPKDQWMKKWWEMKREIVGVVEPVPHDETYCDPASLFHVSNDYSFIRYYTRTLYQFQFQEALCQAAKHEGPLHKCDISNSTEAGQKLFNMLRLGKSEPWTLALENVVGAKNMNVRPLLNYFEPLFTWLKDQNKNSFVGWSTDWSPYADQSIKVRISLKSALGDKAYEWNDNEMYLFRCSVAYAMRQYFLKVKNQMILFGEEDVRVANLKPRISFNFFVTAPKNVSDIIPRTEVEKAIRMSRSRINDAFRLNDNSLEFLGIQPTLGPPNQPPVS

SEQ ID NO: 38 - protein, 942 aa, artificial
  ACE2 18-732 S645C+R273A with IgG1 YTE
QSTIEEQAKTFLDKFNHEAEDLFYQSSLASWNYNTNITEENVQNMNNAGDKWSAFLKEQSTLAQMYPLQEIQNLTVKLQLQALQQNGSSVLSEDKSKRLNTILNTMSTIYSTGKVCNPDNPQECLLLEPGLNEIMANSLDYNERLWAWESWRSEVGKQLRPLYEEYVVLKNEMARANHYEDYGDYWRGDYEVNGVDGYDYSRGQLIEDVEHTFEEIKPLYEHLHAYVRAKLMNAYPSYISPIGCLPAHLLGDMWGAFWTNLYSLTVPFGQKPNIDVTDAMVDQAWDAQRIFKEAEKFFVSVGLPNMTQGFWENSMLTDPGNVQKAVCHPTAWDLGKGDFRILMCTKVTMDDFLTAHHEMGHIQYDMAYAAQPFLLRNGANEGFHEAVGEIMSLSAATPKHLKSIGLLSPDFQEDNETEINFLLKQALTIVGTLPFTYMLEKWRWMVFKGEIPKDQWMKKWWEMKREIVGVVEPVPHDETYCDPASLFHVSNDYSFIRYYTRTLYQFQFQEALCQAAKHEGPLHKCDISNSTEAGQKLFNMLRLGKSEPWTLALENVVGAKNMNVRPLLNYFEPLFTWLKDQNKNSFVGWSTDWSPYADQSIKVRISLKSALGDKAYEWNDNEMYLFRCSVAYAMRQYFLKVKNQMILFGEEDVRVANLKPRISFNFFVTAPKNVSDIIPRTEVEKAIRMSRSRINDAFRLNDNSLEFLGIQPTLGDKTHTCPPCPAPELLGGPSVFLFPPKPKDTLYITREPEVTCVVVDVSHEDPEVKFNWYVDGVEVHNAKTKPREEQYNSTYRVVSVLTVLHQDWLNGKEYKCKVSNKALPAPIEKTISKAKGQPREPQVYTLPPSRDELTKNQVSLTCLVKGFYPSDIAVEWESNGQPENNYKTTPPVLDSDGSFFLYSKLTVDKSRWQQGNVFSCSVMHEALHNHYTQKSLSLSPGK

SEQ ID NO: 39 - protein, 950 aa, artificial
  ACE2 18-740 S645C+R273A with IgG1 YTE
QSTIEEQAKTFLDKFNHEAEDLFYQSSLASWNYNTNITEENVQNMNNAGDKWSAFLKEQSTLAQMYPLQEIQNLTVKLQLQALQQNGSSVLSEDKSKRLNTILNTMSTIYSTGKVCNPDNPQECLLLEPGLNEIMANSLDYNERLWAWESWRSEVGKQLRPLYEEYVVLKNEMARANHYEDYGDYWRGDYEVNGVDGYDYSRGQLIEDVEHTFEEIKPLYEHLHAYVRAKLMNAYPSYISPIGCLPAHLLGDMWGAFWTNLYSLTVPFGQKPNIDVTDAMVDQAWDAQRIFKEAEKFFVSVGLPNMTQGFWENSMLTDPGNVQKAVCHPTAWDLGKGDFRILMCTKVTMDDFLTAHHEMGHIQYDMAYAAQPFLLRNGANEGFHEAVGEIMSLSAATPKHLKSIGLLSPDFQEDNETEINFLLKQALTIVGTLPFTYMLEKWRWMVFKGEIPKDQWMKKWWEMKREIVGVVEPVPHDETYCDPASLFHVSNDYSFIRYYTRTLYQFQFQEALCQAAKHEGPLHKCDISNSTEAGQKLFNMLRLGKSEPWTLALENVVGAKNMNVRPLLNYFEPLFTWLKDQNKNSFVGWSTDWSPYADQSIKVRISLKSALGDKAYEWNDNEMYLFRCSVAYAMRQYFLKVKNQMILFGEEDVRVANLKPRISFNFFVTAPKNVSDIIPRTEVEKAIRMSRSRINDAFRLNDNSLEFLGIQPTLGPPNQPPVSDKTHTCPPCPAPELLGGPSVFLFPPKPKDTLYITREPEVTCVVVDVSHEDPEVKFNWYVDGVEVHNAKTKPREEQYNSTYRVVSVLTVLHQDWLNGKEYKCKVSNKALPAPIEKTISKAKGQPREPQVYTLPPSRDELTKNQVSLTCLVKGFYPSDIAVEWESNGQPENNYKTTPPVLDSDGSFFLYSKLTVDKSRWQQGNVFSCSVMHEALHNHYTQKSLSLSPGK

SEQ ID NO: 40 - protein, 942 aa, artificial
  ACE2 18-732 S645C with IgG1 wt
QSTIEEQAKTFLDKFNHEAEDLFYQSSLASWNYNTNITEENVQNMNNAGDKWSAFLKEQSTLAQMYPLQEIQNLTVKLQLQALQQNGSSVLSEDKSKRLNTILNTMSTIYSTGKVCNPDNPQECLLLEPGLNEIMANSLDYNERLWAWESWRSEVGKQLRPLYEEYVVLKNEMARANHYEDYGDYWRGDYEVNGVDGYDYSRGQLIEDVEHTFEEIKPLYEHLHAYVRAKLMNAYPSYISPIGCLPAHLLGDMWGRFWTNLYSLTVPFGQKPNIDVTDAMVDQAWDAQRIFKEAEKFFVSVGLPNMTQGFWENSMLTDPGNVQKAVCHPTAWDLGKGDFRILMCTKVTMDDFLTAHHEMGHIQYDMAYAAQPFLLRNGANEGFHEAVGEIMSLSAATPKHLKSIGLLSPDFQEDNETEINFLLKQALTIVGTLPFTYMLEKWRWMVFKGEIPKDQWMKKWWEMKREIVGVVEPVPHDETYCDPASLFHVSNDYSFIRYYTRTLYQFQFQEALCQAAKHEGPLHKCDISNSTEAGQKLFNMLRLGKSEPWTLALENVVGAKNMNVRPLLNYFEPLFTWLKDQNKNSFVGWSTDWSPYADQSIKVRISLKSALGDKAYEWNDNEMYLFRCSVAYAMRQYFLKVKNQMILFGEEDVRVANLKPRISFNFFVTAPKNVSDIIPRTEVEKAIRMSRSRINDAFRLNDNSLEFLGIQPTLGDKTHTCPPCPAPELLGGPSVFLFPPKPKDTLMISRTPEVTCVVVDVSHEDPEVKFNWYVDGVEVHNAKTKPREEQYNSTYRVVSVLTVLHQDWLNGKEYKCKVSNKALPAPIEKTISKAKGQPREPQVYTLPPSRDELTKNQVSLTCLVKGFYPSDIAVEWESNGQPENNYKTTPPVLDSDGSFFLYSKLTVDKSRWQQGNVFSCSVMHEALHNHYTQKSLSLSPGK

SEQ ID NO: 41 - protein, 950 aa, artificial
  ACE2 18-740 S645C with IgG1 wt
QSTIEEQAKTFLDKFNHEAEDLFYQSSLASWNYNTNITEENVQNMNNAGDKWSAFLKEQSTLAQMYPLQEIQNLTVKLQLQALQQNGSSVLSEDKSKRLNTILNTMSTIYSTGKVCNPDNPQECLLLEPGLNEIMANSLDYNERLWAWESWRSEVGKQLRPLYEEYVVLKNEMARANHYEDYGDYWRGDYEVNGVDGYDYSRGQLIEDVEHTFEEIKPLYEHLHAYVRAKLMNAYPSYISPIGCLPAHLLGDMWGRFWTNLYSLTVPFGQKPNIDVTDAMVDQAWDAQRIFKEAEKFFVSVGLPNMTQGFWENSMLTDPGNVQKAVCHPTAWDLGKGDFRILMCTKVTMDDFLTAHHEMGHIQYDMAYAAQPFLLRNGANEGFHEAVGEIMSLSAATPKHLKSIGLLSPDFQEDNETEINFLLKQALTIVGTLPFTYMLEKWRWMVFKGEIPKDQWMKKWWEMKREIVGVVEPVPHDETYCDPASLFHVSNDYSFIRYYTRTLYQFQFQEALCQAAKHEGPLHKCDISNSTEAGQKLFNMLRLGKSEPWTLALENVVGAKNMNVRPLLNYFEPLFTWLKDQNKNSFVGWSTDWSPYADQSIKVRISLKSALGDKAYEWNDNEMYLFRCSVAYAMRQYFLKVKNQMILFGEEDVRVANLKPRISFNFFVTAPKNVSDIIPRTEVEKAIRMSRSRINDAFRLNDNSLEFLGIQPTLGPPNQPPVSDKTHTCPPCPAPELLGGPSVFLFPPKPKDTLMISRTPEVTCVVVDVSHEDPEVKFNWYVDGVEVHNAKTKPREEQYNSTYRVVSVLTVLHQDWLNGKEYKCKVSNKALPAPIEKTISKAKGQPREPQVYTLPPSRDELTKNQVSLTCLVKGFYPSDIAVEWESNGQPENNYKTTPPVLDSDGSFFLYSKLTVDKSRWQQGNVFSCSVMHEALHNHYTQKSLSLSPGK

SEQ ID NO: 42 - protein, 944 aa, artificial
  ACE2 18-732 S645C with IgG4 wt
QSTIEEQAKTFLDKFNHEAEDLFYQSSLASWNYNTNITEENVQNMNNAGDKWSAFLKEQSTLAQMYPLQEIQNLTVKLQLQALQQNGSSVLSEDKSKRLNTILNTMSTIYSTGKVCNPDNPQECLLLEPGLNEIMANSLDYNERLWAWESWRSEVGKQLRPLYEEYVVLKNEMARANHYEDYGDYWRGDYEVNGVDGYDYSRGQLIEDVEHTFEEIKPLYEHLHAYVRAKLMNAYPSYISPIGCLPAHLLGDMWGRFWTNLYSLTVPFGQKPNIDVTDAMVDQAWDAQRIFKEAEKFFVSVGLPNMTQGFWENSMLTDPGNVQKAVCHPTAWDLGKGDFRILMCTKVTMDDFLTAHHEMGHIQYDMAYAAQPFLLRNGANEGFHEAVGEIMSLSAATPKHLKSIGLLSPDFQEDNETEINFLLKQALTIVGTLPFTYMLEKWRWMVFKGEIPKDQWMKKWWEMKREIVGVVEPVPHDETYCDPASLFHVSNDYSFIRYYTRTLYQFQFQEALCQAAKHEGPLHKCDISNSTEAGQKLFNMLRLGKSEPWTLALENVVGAKNMNVRPLLNYFEPLFTWLKDQNKNSFVGWSTDWSPYADQSIKVRISLKSALGDKAYEWNDNEMYLFRCSVAYAMRQYFLKVKNQMILFGEEDVRVANLKPRISFNFFVTAPKNVSDIIPRTEVEKAIRMSRSRINDAFRLNDNSLEFLGIQPTLGESKYGPPCPPCPAPEFLGGPSVFLFPPKPKDTLMISRTPEVTCVVVDVSQEDPEVQFNWYVDGVEVHNAKTKPREEQFNSTYRVVSVLTVLHQDWLNGKEYKCKVSNKGLPSSIEKTISKAKGQPREPQVYTLPPSQEEMTKNQVSLTCLVKGFYPSDIAVEWESNGQPENNYKTTPPVLDSDGSFFLYSRLTVDKSRWQEGNVFSCSVMHEALHNHYTQKSLSLSLGK

SEQ ID NO: 43 - protein, 952 aa, artificial
  ACE2 18-740 S645C with IgG4 wt
QSTIEEQAKTFLDKFNHEAEDLFYQSSLASWNYNTNITEENVQNMNNAGDKWSAFLKEQSTLAQMYPLQEIQNLTVKLQLQALQQNGSSVLSEDKSKRLNTILNTMSTIYSTGKVCNPDNPQECLLLEPGLNEIMANSLDYNERLWAWESWRSEVGKQLRPLYEEYVVLKNEMARANHYEDYGDYWRGDYEVNGVDGYDYSRGQLIEDVEHTFEEIKPLYEHLHAYVRAKLMNAYPSYISPIGCLPAHLLGDMWGRFWTNLYSLTVPFGQKPNIDVTDAMVDQAWDAQRIFKEAEKFFVSVGLPNMTQGFWENSMLTDPGNVQKAVCHPTAWDLGKGDFRILMCTKVTMDDFLTAHHEMGHIQYDMAYAAQPFLLRNGANEGFHEAVGEIMSLSAATPKHLKSIGLLSPDFQEDNETEINFLLKQALTIVGTLPFTYMLEKWRWMVFKGEIPKDQWMKKWWEMKREIVGVVEPVPHDETYCDPASLFHVSNDYSFIRYYTRTLYQFQFQEALCQAAKHEGPLHKCDISNSTEAGQKLFNMLRLGKSEPWTLALENVVGAKNMNVRPLLNYFEPLFTWLKDQNKNSFVGWSTDWSPYADQSIKVRISLKSALGDKAYEWNDNEMYLFRCSVAYAMRQYFLKVKNQMILFGEEDVRVANLKPRISFNFFVTAPKNVSDIIPRTEVEKAIRMSRSRINDAFRLNDNSLEFLGIQPTLGPPNQPPVSESKYGPPCPPCPAPEFLGGPSVFLFPPKPKDTLMISRTPEVTCVVVDVSQEDPEVQFNWYVDGVEVHNAKTKPREEQFNSTYRVVSVLTVLHQDWLNGKEYKCKVSNKGLPSSIEKTISKAKGQPREPQVYTLPPSQEEMTKNQVSLTCLVKGFYPSDIAVEWESNGQPENNYKTTPPVLDSDGSFFLYSRLTVDKSRWQEGNVFSCSVMHEALHNHYTQKSLSLSLGK

SEQ ID NO: 44 - protein, 216 aa, artificial
  Fc part of IgG4 with YTE mutation
PEFLGGPSVFLFPPKPKDTLYITREPEVTCVVVDVSQEDPEVQFNWYVDGVEVHNAKTKPREEQFNSTYRVVSVLTVLHQDWLNGKEYKCKVSNKGLPSSIEKTISKAKGQPREPQVYTLPPSQEEMTKNQVSLTCLVKGFYPSDIAVEWESNGQPENNYKTTPPVLDSDGSFFLYSRLTVDKSRWQEGNVFSCSVMHEALHNHYTQKSLSLSLGK

SEQ ID NO: 45 - protein, 944 aa, artificial
  ACE2 18-732 S645C with IgG4 YTE
QSTIEEQAKTFLDKFNHEAEDLFYQSSLASWNYNTNITEENVQNMNNAGDKWSAFLKEQSTLAQMYPLQEIQNLTVKLQLQALQQNGSSVLSEDKSKRLNTILNTMSTIYSTGKVCNPDNPQECLLLEPGLNEIMANSLDYNERLWAWESWRSEVGKQLRPLYEEYVVLKNEMARANHYEDYGDYWRGDYEVNGVDGYDYSRGQLIEDVEHTFEEIKPLYEHLHAYVRAKLMNAYPSYISPIGCLPAHLLGDMWGRFWTNLYSLTVPFGQKPNIDVTDAMVDQAWDAQRIFKEAEKFFVSVGLPNMTQGFWENSMLTDPGNVQKAVCHPTAWDLGKGDFRILMCTKVTMDDFLTAHHEMGHIQYDMAYAAQPFLLRNGANEGFHEAVGEIMSLSAATPKHLKSIGLLSPDFQEDNETEINFLLKQALTIVGTLPFTYMLEKWRWMVFKGEIPKDQWMKKWWEMKREIVGVVEPVPHDETYCDPASLFHVSNDYSFIRYYTRTLYQFQFQEALCQAAKHEGPLHKCDISNSTEAGQKLFNMLRLGKSEPWTLALENVVGAKNMNVRPLLNYFEPLFTWLKDQNKNSFVGWSTDWSPYADQSIKVRISLKSALGDKAYEWNDNEMYLFRCSVAYAMRQYFLKVKNQMILFGEEDVRVANLKPRISFNFFVTAPKNVSDIIPRTEVEKAIRMSRSRINDAFRLNDNSLEFLGIQPTLGESKYGPPCPPCPAPEFLGGPSVFLFPPKPKDTLYITREPEVTCVVVDVSQEDPEVQFNWYVDGVEVHNAKTKPREEQFNSTYRVVSVLTVLHQDWLNGKEYKCKVSNKGLPSSIEKTISKAKGQPREPQVYTLPPSQEEMTKNQVSLTCLVKGFYPSDIAVEWESNGQPENNYKTTPPVLDSDGSFFLYSRLTVDKSRWQEGNVFSCSVMHEALHNHYTQKSLSLSLGK

SEQ ID NO: 46 - protein, 952 aa, artificial
  ACE2 18-740 S645C with IgG4 YTE
QSTIEEQAKTFLDKFNHEAEDLFYQSSLASWNYNTNITEENVQNMNNAGDKWSAFLKEQSTLAQMYPLQEIQNLTVKLQLQALQQNGSSVLSEDKSKRLNTILNTMSTIYSTGKVCNPDNPQECLLLEPGLNEIMANSLDYNERLWAWESWRSEVGKQLRPLYEEYVVLKNEMARANHYEDYGDYWRGDYEVNGVDGYDYSRGQLIEDVEHTFEEIKPLYEHLHAYVRAKLMNAYPSYISPIGCLPAHLLGDMWGRFWTNLYSLTVPFGQKPNIDVTDAMVDQAWDAQRIFKEAEKFFVSVGLPNMTQGFWENSMLTDPGNVQKAVCHPTAWDLGKGDFRILMCTKVTMDDFLTAHHEMGHIQYDMAYAAQPFLLRNGANEGFHEAVGEIMSLSAATPKHLKSIGLLSPDFQEDNETEINFLLKQALTIVGTLPFTYMLEKWRWMVFKGEIPKDQWMKKWWEMKREIVGVVEPVPHDETYCDPASLFHVSNDYSFIRYYTRTLYQFQFQEALCQAAKHEGPLHKCDISNSTEAGQKLFNMLRLGKSEPWTLALENVVGAKNMNVRPLLNYFEPLFTWLKDQNKNSFVGWSTDWSPYADQSIKVRISLKSALGDKAYEWNDNEMYLFRCSVAYAMRQYFLKVKNQMILFGEEDVRVANLKPRISFNFFVTAPKNVSDIIPRTEVEKAIRMSRSRINDAFRLNDNSLEFLGIQPTLGPPNQPPVSESKYGPPCPPCPAPEFLGGPSVFLFPPKPKDTLYITREPEVTCVVVDVSQEDPEVQFNWYVDGVEVHNAKTKPREEQFNSTYRVVSVLTVLHQDWLNGKEYKCKVSNKGLPSSIEKTISKAKGQPREPQVYTLPPSQEEMTKNQVSLTCLVKGFYPSDIAVEWESNGQPENNYKTTPPVLDSDGSFFLYSRLTVDKSRWQEGNVFSCSVMHEALHNHYTQKSLSLSLGK

SEQ ID NO: 47 - protein, 942 aa, artificial
  ACE2 18-732 S645C H374N H378N with IgG1 wt
QSTIEEQAKTFLDKFNHEAEDLFYQSSLASWNYNTNITEENVQNMNNAGDKWSAFLKEQSTLAQMYPLQEIQNLTVKLQLQALQQNGSSVLSEDKSKRLNTILNTMSTIYSTGKVCNPDNPQECLLLEPGLNEIMANSLDYNERLWAWESWRSEVGKQLRPLYEEYVVLKNEMARANHYEDYGDYWRGDYEVNGVDGYDYSRGQLIEDVEHTFEEIKPLYEHLHAYVRAKLMNAYPSYISPIGCLPAHLLGDMWGRFWTNLYSLTVPFGQKPNIDVTDAMVDQAWDAQRIFKEAEKFFVSVGLPNMTQGFWENSMLTDPGNVQKAVCHPTAWDLGKGDFRILMCTKVTMDDFLTAHNEMGNIQYDMAYAAQPFLLRNGANEGFHEAVGEIMSLSAATPKHLKSIGLLSPDFQEDNETEINFLLKQALTIVGTLPFTYMLEKWRWMVFKGEIPKDQWMKKWWEMKREIVGVVEPVPHDETYCDPASLFHVSNDYSFIRYYTRTLYQFQFQEALCQAAKHEGPLHKCDISNSTEAGQKLFNMLRLGKSEPWTLALENVVGAKNMNVRPLLNYFEPLFTWLKDQNKNSFVGWSTDWSPYADQSIKVRISLKSALGDKAYEWNDNEMYLFRCSVAYAMRQYFLKVKNQMILFGEEDVRVANLKPRISFNFFVTAPKNVSDIIPRTEVEKAIRMSRSRINDAFRLNDNSLEFLGIQPTLGDKTHTCPPCPAPELLGGPSVFLFPPKPKDTLMISRTPEVTCVVVDVSHEDPEVKFNWYVDGVEVHNAKTKPREEQYNSTYRVVSVLTVLHQDWLNGKEYKCKVSNKALPAPIEKTISKAKGQPREPQVYTLPPSRDELTKNQVSLTCLVKGFYPSDIAVEWESNGQPENNYKTTPPVLDSDGSFFLYSKLTVDKSRWQQGNVFSCSVMHEALHNHYTQKSLSLSPGK

SEQ ID NO: 48 - protein, 950 aa, artificial
  ACE2 18-740 S645C H374N H378N with IgG1 wt
QSTIEEQAKTFLDKFNHEAEDLFYQSSLASWNYNTNITEENVQNMNNAGDKWSAFLKEQSTLAQMYPLQEIQNLTVKLQLQALQQNGSSVLSEDKSKRLNTILNTMSTIYSTGKVCNPDNPQECLLLEPGLNEIMANSLDYNERLWAWESWRSEVGKQLRPLYEEYVVLKNEMARANHYEDYGDYWRGDYEVNGVDGYDYSRGQLIEDVEHTFEEIKPLYEHLHAYVRAKLMNAYPSYISPIGCLPAHLLGDMWGRFWTNLYSLTVPFGQKPNIDVTDAMVDQAWDAQRIFKEAEKFFVSVGLPNMTQGFWENSMLTDPGNVQKAVCHPTAWDLGKGDFRILMCTKVTMDDFLTAHNEMGNIQYDMAYAAQPFLLRNGANEGFHEAVGEIMSLSAATPKHLKSIGLLSPDFQEDNETEINFLLKQALTIVGTLPFTYMLEKWRWMVFKGEIPKDQWMKKWWEMKREIVGVVEPVPHDETYCDPASLFHVSNDYSFIRYYTRTLYQFQFQEALCQAAKHEGPLHKCDISNSTEAGQKLFNMLRLGKSEPWTLALENVVGAKNMNVRPLLNYFEPLFTWLKDQNKNSFVGWSTDWSPYADQSIKVRISLKSALGDKAYEWNDNEMYLFRCSVAYAMRQYFLKVKNQMILFGEEDVRVANLKPRISFNFFVTAPKNVSDIIPRTEVEKAIRMSRSRINDAFRLNDNSLEFLGIQPTLGPPNQPPVSDKTHTCPPCPAPELLGGPSVFLFPPKPKDTLMISRTPEVTCVVVDVSHEDPEVKFNWYVDGVEVHNAKTKPREEQYNSTYRVVSVLTVLHQDWLNGKEYKCKVSNKALPAPIEKTISKAKGQPREPQVYTLPPSRDELTKNQVSLTCLVKGFYPSDIAVEWESNGQPENNYKTTPPVLDSDGSFFLYSKLTVDKSRWQQGNVFSCSVMHEALHNHYTQKSLSLSPGK

SEQ ID NO: 49 - protein, 942 aa, artificial
  ACE2 18-732 S645C R273A with IgG1 wt
QSTIEEQAKTFLDKFNHEAEDLFYQSSLASWNYNTNITEENVQNMNNAGDKWSAFLKEQSTLAQMYPLQEIQNLTVKLQLQALQQNGSSVLSEDKSKRLNTILNTMSTIYSTGKVCNPDNPQECLLLEPGLNEIMANSLDYNERLWAWESWRSEVGKQLRPLYEEYVVLKNEMARANHYEDYGDYWRGDYEVNGVDGYDYSRGQLIEDVEHTFEEIKPLYEHLHAYVRAKLMNAYPSYISPIGCLPAHLLGDMWGAFWTNLYSLTVPFGQKPNIDVTDAMVDQAWDAQRIFKEAEKFFVSVGLPNMTQGFWENSMLTDPGNVQKAVCHPTAWDLGKGDFRILMCTKVTMDDFLTAHHEMGHIQYDMAYAAQPFLLRNGANEGFHEAVGEIMSLSAATPKHLKSIGLLSPDFQEDNETEINFLLKQALTIVGTLPFTYMLEKWRWMVFKGEIPKDQWMKKWWEMKREIVGVVEPVPHDETYCDPASLFHVSNDYSFIRYYTRTLYQFQFQEALCQAAKHEGPLHKCDISNSTEAGQKLFNMLRLGKSEPWTLALENVVGAKNMNVRPLLNYFEPLFTWLKDQNKNSFVGWSTDWSPYADQSIKVRISLKSALGDKAYEWNDNEMYLFRCSVAYAMRQYFLKVKNQMILFGEEDVRVANLKPRISFNFFVTAPKNVSDIIPRTEVEKAIRMSRSRINDAFRLNDNSLEFLGIQPTLGDKTHTCPPCPAPELLGGPSVFLFPPKPKDTLMISRTPEVTCVVVDVSHEDPEVKFNWYVDGVEVHNAKTKPREEQYNSTYRVVSVLTVLHQDWLNGKEYKCKVSNKALPAPIEKTISKAKGQPREPQVYTLPPSRDELTKNQVSLTCLVKGFYPSDIAVEWESNGQPENNYKTTPPVLDSDGSFFLYSKLTVDKSRWQQGNVFSCSVMHEALHNHYTQKSLSLSPGK

SEQ ID NO: 50 - protein, 950 aa, artificial
  ACE2 18-740 S645C R273A IgG1 wt
QSTIEEQAKTFLDKFNHEAEDLFYQSSLASWNYNTNITEENVQNMNNAGDKWSAFLKEQSTLAQMYPLQEIQNLTVKLQLQALQQNGSSVLSEDKSKRLNTILNTMSTIYSTGKVCNPDNPQECLLLEPGLNEIMANSLDYNERLWAWESWRSEVGKQLRPLYEEYVVLKNEMARANHYEDYGDYWRGDYEVNGVDGYDYSRGQLIEDVEHTFEEIKPLYEHLHAYVRAKLMNAYPSYISPIGCLPAHLLGDMWGAFWTNLYSLTVPFGQKPNIDVTDAMVDQAWDAQRIFKEAEKFFVSVGLPNMTQGFWENSMLTDPGNVQKAVCHPTAWDLGKGDFRILMCTKVTMDDFLTAHHEMGHIQYDMAYAAQPFLLRNGANEGFHEAVGEIMSLSAATPKHLKSIGLLSPDFQEDNETEINFLLKQALTIVGTLPFTYMLEKWRWMVFKGEIPKDQWMKKWWEMKREIVGVVEPVPHDETYCDPASLFHVSNDYSFIRYYTRTLYQFQFQEALCQAAKHEGPLHKCDISNSTEAGQKLFNMLRLGKSEPWTLALENVVGAKNMNVRPLLNYFEPLFTWLKDQNKNSFVGWSTDWSPYADQSIKVRISLKSALGDKAYEWNDNEMYLFRCSVAYAMRQYFLKVKNQMILFGEEDVRVANLKPRISFNFFVTAPKNVSDIIPRTEVEKAIRMSRSRINDAFRLNDNSLEFLGIQPTLGPPNQPPVSDKTHTCPPCPAPELLGGPSVFLFPPKPKDTLMISRTPEVTCVVVDVSHEDPEVKFNWYVDGVEVHNAKTKPREEQYNSTYRVVSVLTVLHQDWLNGKEYKCKVSNKALPAPIEKTISKAKGQPREPQVYTLPPSRDELTKNQVSLTCLVKGFYPSDIAVEWESNGQPENNYKTTPPVLDSDGSFFLYSKLTVDKSRWQQGNVFSCSVMHEALHNHYTQKSLSLSPGK

SEQ ID NO: 51 - protein, 944 aa, artificial
  ACE2 18-732 S645C H374N H378N with IgG4 wt
QSTIEEQAKTFLDKFNHEAEDLFYQSSLASWNYNTNITEENVQNMNNAGDKWSAFLKEQSTLAQMYPLQEIQNLTVKLQLQALQQNGSSVLSEDKSKRLNTILNTMSTIYSTGKVCNPDNPQECLLLEPGLNEIMANSLDYNERLWAWESWRSEVGKQLRPLYEEYVVLKNEMARANHYEDYGDYWRGDYEVNGVDGYDYSRGQLIEDVEHTFEEIKPLYEHLHAYVRAKLMNAYPSYISPIGCLPAHLLGDMWGRFWTNLYSLTVPFGQKPNIDVTDAMVDQAWDAQRIFKEAEKFFVSVGLPNMTQGFWENSMLTDPGNVQKAVCHPTAWDLGKGDFRILMCTKVTMDDFLTAHNEMGNIQYDMAYAAQPFLLRNGANEGFHEAVGEIMSLSAATPKHLKSIGLLSPDFQEDNETEINFLLKQALTIVGTLPFTYMLEKWRWMVFKGEIPKDQWMKKWWEMKREIVGVVEPVPHDETYCDPASLFHVSNDYSFIRYYTRTLYQFQFQEALCQAAKHEGPLHKCDISNSTEAGQKLFNMLRLGKSEPWTLALENVVGAKNMNVRPLLNYFEPLFTWLKDQNKNSFVGWSTDWSPYADQSIKVRISLKSALGDKAYEWNDNEMYLFRCSVAYAMRQYFLKVKNQMILFGEEDVRVANLKPRISFNFFVTAPKNVSDIIPRTEVEKAIRMSRSRINDAFRLNDNSLEFLGIQPTLGESKYGPPCPPCPAPEFLGGPSVFLFPPKPKDTLMISRTPEVTCVVVDVSQEDPEVQFNWYVDGVEVHNAKTKPREEQFNSTYRVVSVLTVLHQDWLNGKEYKCKVSNKGLPSSIEKTISKAKGQPREPQVYTLPPSQEEMTKNQVSLTCLVKGFYPSDIAVEWESNGQPENNYKTTPPVLDSDGSFFLYSRLTVDKSRWQEGNVFSCSVMHEALHNHYTQKSLSLSLGK

SEQ ID NO: 52 - protein, 952 aa, artificial
  ACE2 18-740 S645C H374N H378N with IgG4 wt
QSTIEEQAKTFLDKFNHEAEDLFYQSSLASWNYNTNITEENVQNMNNAGDKWSAFLKEQSTLAQMYPLQEIQNLTVKLQLQALQQNGSSVLSEDKSKRLNTILNTMSTIYSTGKVCNPDNPQECLLLEPGLNEIMANSLDYNERLWAWESWRSEVGKQLRPLYEEYVVLKNEMARANHYEDYGDYWRGDYEVNGVDGYDYSRGQLIEDVEHTFEEIKPLYEHLHAYVRAKLMNAYPSYISPIGCLPAHLLGDMWGRFWTNLYSLTVPFGQKPNIDVTDAMVDQAWDAQRIFKEAEKFFVSVGLPNMTQGFWENSMLTDPGNVQKAVCHPTAWDLGKGDFRILMCTKVTMDDFLTAHNEMGNIQYDMAYAAQPFLLRNGANEGFHEAVGEIMSLSAATPKHLKSIGLLSPDFQEDNETEINFLLKQALTIVGTLPFTYMLEKWRWMVFKGEIPKDQWMKKWWEMKREIVGVVEPVPHDETYCDPASLFHVSNDYSFIRYYTRTLYQFQFQEALCQAAKHEGPLHKCDISNSTEAGQKLFNMLRLGKSEPWTLALENVVGAKNMNVRPLLNYFEPLFTWLKDQNKNSFVGWSTDWSPYADQSIKVRISLKSALGDKAYEWNDNEMYLFRCSVAYAMRQYFLKVKNQMILFGEEDVRVANLKPRISFNFFVTAPKNVSDIIPRTEVEKAIRMSRSRINDAFRLNDNSLEFLGIQPTLGPPNQPPVSESKYGPPCPPCPAPEFLGGPSVFLFPPKPKDTLMISRTPEVTCVVVDVSQEDPEVQFNWYVDGVEVHNAKTKPREEQFNSTYRVVSVLTVLHQDWLNGKEYKCKVSNKGLPSSIEKTISKAKGQPREPQVYTLPPSQEEMTKNQVSLTCLVKGFYPSDIAVEWESNGQPENNYKTTPPVLDSDGSFFLYSRLTVDKSRWQEGNVFSCSVMHEALHNHYTQKSLSLSLGK

SEQ ID NO: 53 - protein, 944 aa, artificial
  ACE2 18-732 S645C R273A IgG4 wt
QSTIEEQAKTFLDKFNHEAEDLFYQSSLASWNYNTNITEENVQNMNNAGDKWSAFLKEQSTLAQMYPLQEIQNLTVKLQLQALQQNGSSVLSEDKSKRLNTILNTMSTIYSTGKVCNPDNPQECLLLEPGLNEIMANSLDYNERLWAWESWRSEVGKQLRPLYEEYVVLKNEMARANHYEDYGDYWRGDYEVNGVDGYDYSRGQLIEDVEHTFEEIKPLYEHLHAYVRAKLMNAYPSYISPIGCLPAHLLGDMWGAFWTNLYSLTVPFGQKPNIDVTDAMVDQAWDAQRIFKEAEKFFVSVGLPNMTQGFWENSMLTDPGNVQKAVCHPTAWDLGKGDFRILMCTKVTMDDFLTAHHEMGHIQYDMAYAAQPFLLRNGANEGFHEAVGEIMSLSAATPKHLKSIGLLSPDFQEDNETEINFLLKQALTIVGTLPFTYMLEKWRWMVFKGEIPKDQWMKKWWEMKREIVGVVEPVPHDETYCDPASLFHVSNDYSFIRYYTRTLYQFQFQEALCQAAKHEGPLHKCDISNSTEAGQKLFNMLRLGKSEPWTLALENVVGAKNMNVRPLLNYFEPLFTWLKDQNKNSFVGWSTDWSPYADQSIKVRISLKSALGDKAYEWNDNEMYLFRCSVAYAMRQYFLKVKNQMILFGEEDVRVANLKPRISFNFFVTAPKNVSDIIPRTEVEKAIRMSRSRINDAFRLNDNSLEFLGIQPTLGESKYGPPCPPCPAPEFLGGPSVFLFPPKPKDTLMISRTPEVTCVVVDVSQEDPEVQFNWYVDGVEVHNAKTKPREEQFNSTYRVVSVLTVLHQDWLNGKEYKCKVSNKGLPSSIEKTISKAKGQPREPQVYTLPPSQEEMTKNQVSLTCLVKGFYPSDIAVEWESNGQPENNYKTTPPVLDSDGSFFLYSRLTVDKSRWQEGNVFSCSVMHEALHNHYTQKSLSLSLGK

SEQ ID NO: 54 - protein, 952 aa, artificial
  ACE2 18-740 S645C R273A with IgG4 wt
QSTIEEQAKTFLDKFNHEAEDLFYQSSLASWNYNTNITEENVQNMNNAGDKWSAFLKEQSTLAQMYPLQEIQNLTVKLQLQALQQNGSSVLSEDKSKRLNTILNTMSTIYSTGKVCNPDNPQECLLLEPGLNEIMANSLDYNERLWAWESWRSEVGKQLRPLYEEYVVLKNEMARANHYEDYGDYWRGDYEVNGVDGYDYSRGQLIEDVEHTFEEIKPLYEHLHAYVRAKLMNAYPSYISPIGCLPAHLLGDMWGAFWTNLYSLTVPFGQKPNIDVTDAMVDQAWDAQRIFKEAEKFFVSVGLPNMTQGFWENSMLTDPGNVQKAVCHPTAWDLGKGDFRILMCTKVTMDDFLTAHHEMGHIQYDMAYAAQPFLLRNGANEGFHEAVGEIMSLSAATPKHLKSIGLLSPDFQEDNETEINFLLKQALTIVGTLPFTYMLEKWRWMVFKGEIPKDQWMKKWWEMKREIVGVVEPVPHDETYCDPASLFHVSNDYSFIRYYTRTLYQFQFQEALCQAAKHEGPLHKCDISNSTEAGQKLFNMLRLGKSEPWTLALENVVGAKNMNVRPLLNYFEPLFTWLKDQNKNSFVGWSTDWSPYADQSIKVRISLKSALGDKAYEWNDNEMYLFRCSVAYAMRQYFLKVKNQMILFGEEDVRVANLKPRISFNFFVTAPKNVSDIIPRTEVEKAIRMSRSRINDAFRLNDNSLEFLGIQPTLGPPNQPPVSESKYGPPCPPCPAPEFLGGPSVFLFPPKPKDTLMISRTPEVTCVVVDVSQEDPEVQFNWYVDGVEVHNAKTKPREEQFNSTYRVVSVLTVLHQDWLNGKEYKCKVSNKGLPSSIEKTISKAKGQPREPQVYTLPPSQEEMTKNQVSLTCLVKGFYPSDIAVEWESNGQPENNYKTTPPVLDSDGSFFLYSRLTVDKSRWQEGNVFSCSVMHEALHNHYTQKSLSLSLGK

SEQ ID NO: 55 - protein, 944 aa, artificial
  ACE2 18-732 S645C H374N H378N with IgG4 YTE
QSTIEEQAKTFLDKFNHEAEDLFYQSSLASWNYNTNITEENVQNMNNAGDKWSAFLKEQSTLAQMYPLQEIQNLTVKLQLQALQQNGSSVLSEDKSKRLNTILNTMSTIYSTGKVCNPDNPQECLLLEPGLNEIMANSLDYNERLWAWESWRSEVGKQLRPLYEEYVVLKNEMARANHYEDYGDYWRGDYEVNGVDGYDYSRGQLIEDVEHTFEEIKPLYEHLHAYVRAKLMNAYPSYISPIGCLPAHLLGDMWGRFWTNLYSLTVPFGQKPNIDVTDAMVDQAWDAQRIFKEAEKFFVSVGLPNMTQGFWENSMLTDPGNVQKAVCHPTAWDLGKGDFRILMCTKVTMDDFLTAHNEMGNIQYDMAYAAQPFLLRNGANEGFHEAVGEIMSLSAATPKHLKSIGLLSPDFQEDNETEINFLLKQALTIVGTLPFTYMLEKWRWMVFKGEIPKDQWMKKWWEMKREIVGVVEPVPHDETYCDPASLFHVSNDYSFIRYYTRTLYQFQFQEALCQAAKHEGPLHKCDISNSTEAGQKLFNMLRLGKSEPWTLALENVVGAKNMNVRPLLNYFEPLFTWLKDQNKNSFVGWSTDWSPYADQSIKVRISLKSALGDKAYEWNDNEMYLFRCSVAYAMRQYFLKVKNQMILFGEEDVRVANLKPRISFNFFVTAPKNVSDIIPRTEVEKAIRMSRSRINDAFRLNDNSLEFLGIQPTLGESKYGPPCPPCPAPEFLGGPSVFLFPPKPKDTLYITREPEVTCVVVDVSQEDPEVQFNWYVDGVEVHNAKTKPREEQFNSTYRVVSVLTVLHQDWLNGKEYKCKVSNKGLPSSIEKTISKAKGQPREPQVYTLPPSQEEMTKNQVSLTCLVKGFYPSDIAVEWESNGQPENNYKTTPPVLDSDGSFFLYSRLTVDKSRWQEGNVFSCSVMHEALHNHYTQKSLSLSLGK

SEQ ID NO: 56 - protein, 952 aa, artificial
  ACE2 18-740 S645C H374N H378N with IgG4 YTE
QSTIEEQAKTFLDKFNHEAEDLFYQSSLASWNYNTNITEENVQNMNNAGDKWSAFLKEQSTLAQMYPLQEIQNLTVKLQLQALQQNGSSVLSEDKSKRLNTILNTMSTIYSTGKVCNPDNPQECLLLEPGLNEIMANSLDYNERLWAWESWRSEVGKQLRPLYEEYVVLKNEMARANHYEDYGDYWRGDYEVNGVDGYDYSRGQLIEDVEHTFEEIKPLYEHLHAYVRAKLMNAYPSYISPIGCLPAHLLGDMWGRFWTNLYSLTVPFGQKPNIDVTDAMVDQAWDAQRIFKEAEKFFVSVGLPNMTQGFWENSMLTDPGNVQKAVCHPTAWDLGKGDFRILMCTKVTMDDFLTAHNEMGNIQYDMAYAAQPFLLRNGANEGFHEAVGEIMSLSAATPKHLKSIGLLSPDFQEDNETEINFLLKQALTIVGTLPFTYMLEKWRWMVFKGEIPKDQWMKKWWEMKREIVGVVEPVPHDETYCDPASLFHVSNDYSFIRYYTRTLYQFQFQEALCQAAKHEGPLHKCDISNSTEAGQKLFNMLRLGKSEPWTLALENVVGAKNMNVRPLLNYFEPLFTWLKDQNKNSFVGWSTDWSPYADQSIKVRISLKSALGDKAYEWNDNEMYLFRCSVAYAMRQYFLKVKNQMILFGEEDVRVANLKPRISFNFFVTAPKNVSDIIPRTEVEKAIRMSRSRINDAFRLNDNSLEFLGIQPTLGPPNQPPVSESKYGPPCPPCPAPEFLGGPSVFLFPPKPKDTLYITREPEVTCVVVDVSQEDPEVQFNWYVDGVEVHNAKTKPREEQFNSTYRVVSVLTVLHQDWLNGKEYKCKVSNKGLPSSIEKTISKAKGQPREPQVYTLPPSQEEMTKNQVSLTCLVKGFYPSDIAVEWESNGQPENNYKTTPPVLDSDGSFFLYSRLTVDKSRWQEGNVFSCSVMHEALHNHYTQKSLSLSLGK

SEQ ID NO: 57 - protein, 944 aa, artificial
  ACE2 18-732 S645C R273 A with IgG4 YTE
QSTIEEQAKTFLDKFNHEAEDLFYQSSLASWNYNTNITEENVQNMNNAGDKWSAFLKEQSTLAQMYPLQEIQNLTVKLQLQALQQNGSSVLSEDKSKRLNTILNTMSTIYSTGKVCNPDNPQECLLLEPGLNEIMANSLDYNERLWAWESWRSEVGKQLRPLYEEYVVLKNEMARANHYEDYGDYWRGDYEVNGVDGYDYSRGQLIEDVEHTFEEIKPLYEHLHAYVRAKLMNAYPSYISPIGCLPAHLLGDMWGAFWTNLYSLTVPFGQKPNIDVTDAMVDQAWDAQRIFKEAEKFFVSVGLPNMTQGFWENSMLTDPGNVQKAVCHPTAWDLGKGDFRILMCTKVTMDDFLTAHHEMGHIQYDMAYAAQPFLLRNGANEGFHEAVGEIMSLSAATPKHLKSIGLLSPDFQEDNETEINFLLKQALTIVGTLPFTYMLEKWRWMVFKGEIPKDQWMKKWWEMKREIVGVVEPVPHDETYCDPASLFHVSNDYSFIRYYTRTLYQFQFQEALCQAAKHEGPLHKCDISNSTEAGQKLFNMLRLGKSEPWTLALENVVGAKNMNVRPLLNYFEPLFTWLKDQNKNSFVGWSTDWSPYADQSIKVRISLKSALGDKAYEWNDNEMYLFRCSVAYAMRQYFLKVKNQMILFGEEDVRVANLKPRISFNFFVTAPKNVSDIIPRTEVEKAIRMSRSRINDAFRLNDNSLEFLGIQPTLGESKYGPPCPPCPAPEFLGGPSVFLFPPKPKDTLYITREPEVTCVVVDVSQEDPEVQFNWYVDGVEVHNAKTKPREEQFNSTYRVVSVLTVLHQDWLNGKEYKCKVSNKGLPSSIEKTISKAKGQPREPQVYTLPPSQEEMTKNQVSLTCLVKGFYPSDIAVEWESNGQPENNYKTTPPVLDSDGSFFLYSRLTVDKSRWQEGNVFSCSVMHEALHNHYTQKSLSLSLGK

SEQ ID NO: 58 - protein, 952 aa, artificial
  ACE2 18-740 S645C R273A with IgG4 YTE
QSTIEEQAKTFLDKFNHEAEDLFYQSSLASWNYNTNITEENVQNMNNAGDKWSAFLKEQSTLAQMYPLQEIQNLTVKLQLQALQQNGSSVLSEDKSKRLNTILNTMSTIYSTGKVCNPDNPQECLLLEPGLNEIMANSLDYNERLWAWESWRSEVGKQLRPLYEEYVVLKNEMARANHYEDYGDYWRGDYEVNGVDGYDYSRGQLIEDVEHTFEEIKPLYEHLHAYVRAKLMNAYPSYISPIGCLPAHLLGDMWGAFWTNLYSLTVPFGQKPNIDVTDAMVDQAWDAQRIFKEAEKFFVSVGLPNMTQGFWENSMLTDPGNVQKAVCHPTAWDLGKGDFRILMCTKVTMDDFLTAHHEMGHIQYDMAYAAQPFLLRNGANEGFHEAVGEIMSLSAATPKHLKSIGLLSPDFQEDNETEINFLLKQALTIVGTLPFTYMLEKWRWMVFKGEIPKDQWMKKWWEMKREIVGVVEPVPHDETYCDPASLFHVSNDYSFIRYYTRTLYQFQFQEALCQAAKHEGPLHKCDISNSTEAGQKLFNMLRLGKSEPWTLALENVVGAKNMNVRPLLNYFEPLFTWLKDQNKNSFVGWSTDWSPYADQSIKVRISLKSALGDKAYEWNDNEMYLFRCSVAYAMRQYFLKVKNQMILFGEEDVRVANLKPRISFNFFVTAPKNVSDIIPRTEVEKAIRMSRSRINDAFRLNDNSLEFLGIQPTLGPPNQPPVSESKYGPPCPPCPAPEFLGGPSVFLFPPKPKDTLYITREPEVTCVVVDVSQEDPEVQFNWYVDGVEVHNAKTKPREEQFNSTYRVVSVLTVLHQDWLNGKEYKCKVSNKGLPSSIEKTISKAKGQPREPQVYTLPPSQEEMTKNQVSLTCLVKGFYPSDIAVEWESNGQPENNYKTTPPVLDSDGSFFLYSRLTVDKSRWQEGNVFSCSVMHEALHNHYTQKSLSLSLGK

SEQ ID NO: 59 - protein, 216 aa, artificial
  IgG1 T256D T307Q
PELLGGPSVFLFPPKPKDTLMISRDPEVTCVVVDVSHEDPEVKFNWYVDGVEVHNAKTKPREEQYNSTYRVVSVLQVLHQDWLNGKEYKCKVSNKALPAPIEKTISKAKGQPREPQVYTLPPSRDELTKNQVSLTCLVKGFYPSDIAVEWESNGQPENNYKTTPPVLDSDGSFFLYSKLTVDKSRWQQGNVFSCSVMHEALHNHYTQKSLSLSPGK

SEQ ID NO: 60 - protein, 216 aa, artificial
  IgG4 T256D T307Q
PEFLGGPSVFLFPPKPKDTLMISRDPEVTCVVVDVSQEDPEVQFNWYVDGVEVHNAKTKPREEQFNSTYRVVSVLQVLHQDWLNGKEYKCKVSNKGLPSSIEKTISKAKGQPREPQVYTLPPSQEEMTKNQVSLTCLVKGFYPSDIAVEWESNGQPENNYKTTPPVLDSDGSFFLYSRLTVDKSRWQEGNVFSCSVMHEALHNHYTQKSLSLSLGK

SEQ ID NO: 61 - protein, 942 aa, artificial
  ACE2 18-732 S645C with IgG1 T256D T 307Q
QSTIEEQAKTFLDKFNHEAEDLFYQSSLASWNYNTNITEENVQNMNNAGDKWSAFLKEQSTLAQMYPLQEIQNLTVKLQLQALQQNGSSVLSEDKSKRLNTILNTMSTIYSTGKVCNPDNPQECLLLEPGLNEIMANSLDYNERLWAWESWRSEVGKQLRPLYEEYVVLKNEMARANHYEDYGDYWRGDYEVNGVDGYDYSRGQLIEDVEHTFEEIKPLYEHLHAYVRAKLMNAYPSYISPIGCLPAHLLGDMWGRFWTNLYSLTVPFGQKPNIDVTDAMVDQAWDAQRIFKEAEKFFVSVGLPNMTQGFWENSMLTDPGNVQKAVCHPTAWDLGKGDFRILMCTKVTMDDFLTAHHEMGHIQYDMAYAAQPFLLRNGANEGFHEAVGEIMSLSAATPKHLKSIGLLSPDFQEDNETEINFLLKQALTIVGTLPFTYMLEKWRWMVFKGEIPKDQWMKKWWEMKREIVGVVEPVPHDETYCDPASLFHVSNDYSFIRYYTRTLYQFQFQEALCQAAKHEGPLHKCDISNSTEAGQKLFNMLRLGKSEPWTLALENVVGAKNMNVRPLLNYFEPLFTWLKDQNKNSFVGWSTDWSPYADQSIKVRISLKSALGDKAYEWNDNEMYLFRCSVAYAMRQYFLKVKNQMILFGEEDVRVANLKPRISFNFFVTAPKNVSDIIPRTEVEKAIRMSRSRINDAFRLNDNSLEFLGIQPTLGDKTHTCPPCPAPELLGGPSVFLFPPKPKDTLMISRDPEVTCVVVDVSHEDPEVKFNWYVDGVEVHNAKTKPREEQYNSTYRVVSVLQVLHQDWLNGKEYKCKVSNKALPAPIEKTISKAKGQPREPQVYTLPPSRDELTKNQVSLTCLVKGFYPSDIAVEWESNGQPENNYKTTPPVLDSDGSFFLYSKLTVDKSRWQQGNVFSCSVMHEALHNHYTQKSLSLSPGK

SEQ ID NO: 62 - protein, 950 aa, artificial
  ACE2 18-740 S645C with IgG1 T256D T307Q
QSTIEEQAKTFLDKFNHEAEDLFYQSSLASWNYNTNITEENVQNMNNAGDKWSAFLKEQSTLAQMYPLQEIQNLTVKLQLQALQQNGSSVLSEDKSKRLNTILNTMSTIYSTGKVCNPDNPQECLLLEPGLNEIMANSLDYNERLWAWESWRSEVGKQLRPLYEEYVVLKNEMARANHYEDYGDYWRGDYEVNGVDGYDYSRGQLIEDVEHTFEEIKPLYEHLHAYVRAKLMNAYPSYISPIGCLPAHLLGDMWGRFWTNLYSLTVPFGQKPNIDVTDAMVDQAWDAQRIFKEAEKFFVSVGLPNMTQGFWENSMLTDPGNVQKAVCHPTAWDLGKGDFRILMCTKVTMDDFLTAHHEMGHIQYDMAYAAQPFLLRNGANEGFHEAVGEIMSLSAATPKHLKSIGLLSPDFQEDNETEINFLLKQALTIVGTLPFTYMLEKWRWMVFKGEIPKDQWMKKWWEMKREIVGVVEPVPHDETYCDPASLFHVSNDYSFIRYYTRTLYQFQFQEALCQAAKHEGPLHKCDISNSTEAGQKLFNMLRLGKSEPWTLALENVVGAKNMNVRPLLNYFEPLFTWLKDQNKNSFVGWSTDWSPYADQSIKVRISLKSALGDKAYEWNDNEMYLFRCSVAYAMRQYFLKVKNQMILFGEEDVRVANLKPRISFNFFVTAPKNVSDIIPRTEVEKAIRMSRSRINDAFRLNDNSLEFLGIQPTLGPPNQPPVSDKTHTCPPCPAPELLGGPSVFLFPPKPKDTLMISRDPEVTCVVVDVSHEDPEVKFNWYVDGVEVHNAKTKPREEQYNSTYRVVSVLQVLHQDWLNGKEYKCKVSNKALPAPIEKTISKAKGQPREPQVYTLPPSRDELTKNQVSLTCLVKGFYPSDIAVEWESNGQPENNYKTTPPVLDSDGSFFLYSKLTVDKSRWQQGNVFSCSVMHEALHNHYTQKSLSLSPGK

SEQ ID NO: 63 - protein, 942 aa, artificial
  ACE2 18-732 S645C H374N H378N with IgG1 T256D T307Q
QSTIEEQAKTFLDKFNHEAEDLFYQSSLASWNYNTNITEENVQNMNNAGDKWSAFLKEQSTLAQMYPLQEIQNLTVKLQLQALQQNGSSVLSEDKSKRLNTILNTMSTIYSTGKVCNPDNPQECLLLEPGLNEIMANSLDYNERLWAWESWRSEVGKQLRPLYEEYVVLKNEMARANHYEDYGDYWRGDYEVNGVDGYDYSRGQLIEDVEHTFEEIKPLYEHLHAYVRAKLMNAYPSYISPIGCLPAHLLGDMWGRFWTNLYSLTVPFGQKPNIDVTDAMVDQAWDAQRIFKEAEKFFVSVGLPNMTQGFWENSMLTDPGNVQKAVCHPTAWDLGKGDFRILMCTKVTMDDFLTAHNEMGNIQYDMAYAAQPFLLRNGANEGFHEAVGEIMSLSAATPKHLKSIGLLSPDFQEDNETEINFLLKQALTIVGTLPFTYMLEKWRWMVFKGEIPKDQWMKKWWEMKREIVGVVEPVPHDETYCDPASLFHVSNDYSFIRYYTRTLYQFQFQEALCQAAKHEGPLHKCDISNSTEAGQKLFNMLRLGKSEPWTLALENVVGAKNMNVRPLLNYFEPLFTWLKDQNKNSFVGWSTDWSPYADQSIKVRISLKSALGDKAYEWNDNEMYLFRCSVAYAMRQYFLKVKNQMILFGEEDVRVANLKPRISFNFFVTAPKNVSDIIPRTEVEKAIRMSRSRINDAFRLNDNSLEFLGIQPTLGDKTHTCPPCPAPELLGGPSVFLFPPKPKDTLMISRDPEVTCVVVDVSHEDPEVKFNWYVDGVEVHNAKTKPREEQYNSTYRVVSVLQVLHQDWLNGKEYKCKVSNKALPAPIEKTISKAKGQPREPQVYTLPPSRDELTKNQVSLTCLVKGFYPSDIAVEWESNGQPENNYKTTPPVLDSDGSFFLYSKLTVDKSRWQQGNVFSCSVMHEALHNHYTQKSLSLSPGK

SEQ ID NO: 64 - protein, 950 aa, artificial
  ACE2 18-740 S645C H374N H378N with IgG1 T256D T307Q
QSTIEEQAKTFLDKFNHEAEDLFYQSSLASWNYNTNITEENVQNMNNAGDKWSAFLKEQSTLAQMYPLQEIQNLTVKLQLQALQQNGSSVLSEDKSKRLNTILNTMSTIYSTGKVCNPDNPQECLLLEPGLNEIMANSLDYNERLWAWESWRSEVGKQLRPLYEEYVVLKNEMARANHYEDYGDYWRGDYEVNGVDGYDYSRGQLIEDVEHTFEEIKPLYEHLHAYVRAKLMNAYPSYISPIGCLPAHLLGDMWGRFWTNLYSLTVPFGQKPNIDVTDAMVDQAWDAQRIFKEAEKFFVSVGLPNMTQGFWENSMLTDPGNVQKAVCHPTAWDLGKGDFRILMCTKVTMDDFLTAHNEMGNIQYDMAYAAQPFLLRNGANEGFHEAVGEIMSLSAATPKHLKSIGLLSPDFQEDNETEINFLLKQALTIVGTLPFTYMLEKWRWMVFKGEIPKDQWMKKWWEMKREIVGVVEPVPHDETYCDPASLFHVSNDYSFIRYYTRTLYQFQFQEALCQAAKHEGPLHKCDISNSTEAGQKLFNMLRLGKSEPWTLALENVVGAKNMNVRPLLNYFEPLFTWLKDQNKNSFVGWSTDWSPYADQSIKVRISLKSALGDKAYEWNDNEMYLFRCSVAYAMRQYFLKVKNQMILFGEEDVRVANLKPRISFNFFVTAPKNVSDIIPRTEVEKAIRMSRSRINDAFRLNDNSLEFLGIQPTLGPPNQPPVSDKTHTCPPCPAPELLGGPSVFLFPPKPKDTLMISRDPEVTCVVVDVSHEDPEVKFNWYVDGVEVHNAKTKPREEQYNSTYRVVSVLQVLHQDWLNGKEYKCKVSNKALPAPIEKTISKAKGQPREPQVYTLPPSRDELTKNQVSLTCLVKGFYPSDIAVEWESNGQPENNYKTTPPVLDSDGSFFLYSKLTVDKSRWQQGNVFSCSVMHEALHNHYTQKSLSLSPGK

SEQ ID NO: 65 - protein, 942 aa, artificial
  ACE2 18-732 S645C R273A with IgG1 T256D T307Q
QSTIEEQAKTFLDKFNHEAEDLFYQSSLASWNYNTNITEENVQNMNNAGDKWSAFLKEQSTLAQMYPLQEIQNLTVKLQLQALQQNGSSVLSEDKSKRLNTILNTMSTIYSTGKVCNPDNPQECLLLEPGLNEIMANSLDYNERLWAWESWRSEVGKQLRPLYEEYVVLKNEMARANHYEDYGDYWRGDYEVNGVDGYDYSRGQLIEDVEHTFEEIKPLYEHLHAYVRAKLMNAYPSYISPIGCLPAHLLGDMWGAFWTNLYSLTVPFGQKPNIDVTDAMVDQAWDAQRIFKEAEKFFVSVGLPNMTQGFWENSMLTDPGNVQKAVCHPTAWDLGKGDFRILMCTKVTMDDFLTAHHEMGHIQYDMAYAAQPFLLRNGANEGFHEAVGEIMSLSAATPKHLKSIGLLSPDFQEDNETEINFLLKQALTIVGTLPFTYMLEKWRWMVFKGEIPKDQWMKKWWEMKREIVGVVEPVPHDETYCDPASLFHVSNDYSFIRYYTRTLYQFQFQEALCQAAKHEGPLHKCDISNSTEAGQKLFNMLRLGKSEPWTLALENVVGAKNMNVRPLLNYFEPLFTWLKDQNKNSFVGWSTDWSPYADQSIKVRISLKSALGDKAYEWNDNEMYLFRCSVAYAMRQYFLKVKNQMILFGEEDVRVANLKPRISFNFFVTAPKNVSDIIPRTEVEKAIRMSRSRINDAFRLNDNSLEFLGIQPTLGDKTHTCPPCPAPELLGGPSVFLFPPKPKDTLMISRDPEVTCVVVDVSHEDPEVKFNWYVDGVEVHNAKTKPREEQYNSTYRVVSVLQVLHQDWLNGKEYKCKVSNKALPAPIEKTISKAKGQPREPQVYTLPPSRDELTKNQVSLTCLVKGFYPSDIAVEWESNGQPENNYKTTPPVLDSDGSFFLYSKLTVDKSRWQQGNVFSCSVMHEALHNHYTQKSLSLSPGK

SEQ ID NO: 66 - protein, 950 aa, artificial
  ACE2 18-740 S645C R273A with IgG1 T256D T307Q
QSTIEEQAKTFLDKFNHEAEDLFYQSSLASWNYNTNITEENVQNMNNAGDKWSAFLKEQSTLAQMYPLQEIQNLTVKLQLQALQQNGSSVLSEDKSKRLNTILNTMSTIYSTGKVCNPDNPQECLLLEPGLNEIMANSLDYNERLWAWESWRSEVGKQLRPLYEEYVVLKNEMARANHYEDYGDYWRGDYEVNGVDGYDYSRGQLIEDVEHTFEEIKPLYEHLHAYVRAKLMNAYPSYISPIGCLPAHLLGDMWGAFWTNLYSLTVPFGQKPNIDVTDAMVDQAWDAQRIFKEAEKFFVSVGLPNMTQGFWENSMLTDPGNVQKAVCHPTAWDLGKGDFRILMCTKVTMDDFLTAHHEMGHIQYDMAYAAQPFLLRNGANEGFHEAVGEIMSLSAATPKHLKSIGLLSPDFQEDNETEINFLLKQALTIVGTLPFTYMLEKWRWMVFKGEIPKDQWMKKWWEMKREIVGVVEPVPHDETYCDPASLFHVSNDYSFIRYYTRTLYQFQFQEALCQAAKHEGPLHKCDISNSTEAGQKLFNMLRLGKSEPWTLALENVVGAKNMNVRPLLNYFEPLFTWLKDQNKNSFVGWSTDWSPYADQSIKVRISLKSALGDKAYEWNDNEMYLFRCSVAYAMRQYFLKVKNQMILFGEEDVRVANLKPRISFNFFVTAPKNVSDIIPRTEVEKAIRMSRSRINDAFRLNDNSLEFLGIQPTLGPPNQPPVSDKTHTCPPCPAPELLGGPSVFLFPPKPKDTLMISRDPEVTCVVVDVSHEDPEVKFNWYVDGVEVHNAKTKPREEQYNSTYRVVSVLQVLHQDWLNGKEYKCKVSNKALPAPIEKTISKAKGQPREPQVYTLPPSRDELTKNQVSLTCLVKGFYPSDIAVEWESNGQPENNYKTTPPVLDSDGSFFLYSKLTVDKSRWQQGNVFSCSVMHEALHNHYTQKSLSLSPGK

SEQ ID NO: 67 - protein, 944 aa, artificial
  ACE2 18-732 S645C with IgG4 T256D T307Q
QSTIEEQAKTFLDKFNHEAEDLFYQSSLASWNYNTNITEENVQNMNNAGDKWSAFLKEQSTLAQMYPLQEIQNLTVKLQLQALQQNGSSVLSEDKSKRLNTILNTMSTIYSTGKVCNPDNPQECLLLEPGLNEIMANSLDYNERLWAWESWRSEVGKQLRPLYEEYVVLKNEMARANHYEDYGDYWRGDYEVNGVDGYDYSRGQLIEDVEHTFEEIKPLYEHLHAYVRAKLMNAYPSYISPIGCLPAHLLGDMWGRFWTNLYSLTVPFGQKPNIDVTDAMVDQAWDAQRIFKEAEKFFVSVGLPNMTQGFWENSMLTDPGNVQKAVCHPTAWDLGKGDFRILMCTKVTMDDFLTAHHEMGHIQYDMAYAAQPFLLRNGANEGFHEAVGEIMSLSAATPKHLKSIGLLSPDFQEDNETEINFLLKQALTIVGTLPFTYMLEKWRWMVFKGEIPKDQWMKKWWEMKREIVGVVEPVPHDETYCDPASLFHVSNDYSFIRYYTRTLYQFQFQEALCQAAKHEGPLHKCDISNSTEAGQKLFNMLRLGKSEPWTLALENVVGAKNMNVRPLLNYFEPLFTWLKDQNKNSFVGWSTDWSPYADQSIKVRISLKSALGDKAYEWNDNEMYLFRCSVAYAMRQYFLKVKNQMILFGEEDVRVANLKPRISFNFFVTAPKNVSDIIPRTEVEKAIRMSRSRINDAFRLNDNSLEFLGIQPTLGESKYGPPCPPCPAPEFLGGPSVFLFPPKPKDTLMISRDPEVTCVVVDVSQEDPEVQFNWYVDGVEVHNAKTKPREEQFNSTYRVVSVLQVLHQDWLNGKEYKCKVSNKGLPSSIEKTISKAKGQPREPQVYTLPPSQEEMTKNQVSLTCLVKGFYPSDIAVEWESNGQPENNYKTTPPVLDSDGSFFLYSRLTVDKSRWQEGNVFSCSVMHEALHNHYTQKSLSLSLGK

SEQ ID NO: 68 - protein, 952 aa, artificial
  ACE2 18-740 S645C with IgG4 T256D T307Q
QSTIEEQAKTFLDKFNHEAEDLFYQSSLASWNYNTNITEENVQNMNNAGDKWSAFLKEQSTLAQMYPLQEIQNLTVKLQLQALQQNGSSVLSEDKSKRLNTILNTMSTIYSTGKVCNPDNPQECLLLEPGLNEIMANSLDYNERLWAWESWRSEVGKQLRPLYEEYVVLKNEMARANHYEDYGDYWRGDYEVNGVDGYDYSRGQLIEDVEHTFEEIKPLYEHLHAYVRAKLMNAYPSYISPIGCLPAHLLGDMWGRFWTNLYSLTVPFGQKPNIDVTDAMVDQAWDAQRIFKEAEKFFVSVGLPNMTQGFWENSMLTDPGNVQKAVCHPTAWDLGKGDFRILMCTKVTMDDFLTAHHEMGHIQYDMAYAAQPFLLRNGANEGFHEAVGEIMSLSAATPKHLKSIGLLSPDFQEDNETEINFLLKQALTIVGTLPFTYMLEKWRWMVFKGEIPKDQWMKKWWEMKREIVGVVEPVPHDETYCDPASLFHVSNDYSFIRYYTRTLYQFQFQEALCQAAKHEGPLHKCDISNSTEAGQKLFNMLRLGKSEPWTLALENVVGAKNMNVRPLLNYFEPLFTWLKDQNKNSFVGWSTDWSPYADQSIKVRISLKSALGDKAYEWNDNEMYLFRCSVAYAMRQYFLKVKNQMILFGEEDVRVANLKPRISFNFFVTAPKNVSDIIPRTEVEKAIRMSRSRINDAFRLNDNSLEFLGIQPTLGPPNQPPVSESKYGPPCPPCPAPEFLGGPSVFLFPPKPKDTLMISRDPEVTCVVVDVSQEDPEVQFNWYVDGVEVHNAKTKPREEQFNSTYRVVSVLQVLHQDWLNGKEYKCKVSNKGLPSSIEKTISKAKGQPREPQVYTLPPSQEEMTKNQVSLTCLVKGFYPSDIAVEWESNGQPENNYKTTPPVLDSDGSFFLYSRLTVDKSRWQEGNVFSCSVMHEALHNHYTQKSLSLSLGK

SEQ ID NO: 69 - protein, 944 aa, artificial
  ACE2 18-732 S645C H374N H378N with IgG4 T256D T307Q
QSTIEEQAKTFLDKFNHEAEDLFYQSSLASWNYNTNITEENVQNMNNAGDKWSAFLKEQSTLAQMYPLQEIQNLTVKLQLQALQQNGSSVLSEDKSKRLNTILNTMSTIYSTGKVCNPDNPQECLLLEPGLNEIMANSLDYNERLWAWESWRSEVGKQLRPLYEEYVVLKNEMARANHYEDYGDYWRGDYEVNGVDGYDYSRGQLIEDVEHTFEEIKPLYEHLHAYVRAKLMNAYPSYISPIGCLPAHLLGDMWGRFWTNLYSLTVPFGQKPNIDVTDAMVDQAWDAQRIFKEAEKFFVSVGLPNMTQGFWENSMLTDPGNVQKAVCHPTAWDLGKGDFRILMCTKVTMDDFLTAHNEMGNIQYDMAYAAQPFLLRNGANEGFHEAVGEIMSLSAATPKHLKSIGLLSPDFQEDNETEINFLLKQALTIVGTLPFTYMLEKWRWMVFKGEIPKDQWMKKWWEMKREIVGVVEPVPHDETYCDPASLFHVSNDYSFIRYYTRTLYQFQFQEALCQAAKHEGPLHKCDISNSTEAGQKLFNMLRLGKSEPWTLALENVVGAKNMNVRPLLNYFEPLFTWLKDQNKNSFVGWSTDWSPYADQSIKVRISLKSALGDKAYEWNDNEMYLFRCSVAYAMRQYFLKVKNQMILFGEEDVRVANLKPRISFNFFVTAPKNVSDIIPRTEVEKAIRMSRSRINDAFRLNDNSLEFLGIQPTLGESKYGPPCPPCPAPEFLGGPSVFLFPPKPKDTLMISRDPEVTCVVVDVSQEDPEVQFNWYVDGVEVHNAKTKPREEQFNSTYRVVSVLQVLHQDWLNGKEYKCKVSNKGLPSSIEKTISKAKGQPREPQVYTLPPSQEEMTKNQVSLTCLVKGFYPSDIAVEWESNGQPENNYKTTPPVLDSDGSFFLYSRLTVDKSRWQEGNVFSCSVMHEALHNHYTQKSLSLSLGK

SEQ ID NO: 70 - protein, 952 aa, artificial
  ACE2 18-740 S645C H374N H378N with IgG4 T256D T307Q
QSTIEEQAKTFLDKFNHEAEDLFYQSSLASWNYNTNITEENVQNMNNAGDKWSAFLKEQSTLAQMYPLQEIQNLTVKLQLQALQQNGSSVLSEDKSKRLNTILNTMSTIYSTGKVCNPDNPQECLLLEPGLNEIMANSLDYNERLWAWESWRSEVGKQLRPLYEEYVVLKNEMARANHYEDYGDYWRGDYEVNGVDGYDYSRGQLIEDVEHTFEEIKPLYEHLHAYVRAKLMNAYPSYISPIGCLPAHLLGDMWGRFWTNLYSLTVPFGQKPNIDVTDAMVDQAWDAQRIFKEAEKFFVSVGLPNMTQGFWENSMLTDPGNVQKAVCHPTAWDLGKGDFRILMCTKVTMDDFLTAHNEMGNIQYDMAYAAQPFLLRNGANEGFHEAVGEIMSLSAATPKHLKSIGLLSPDFQEDNETEINFLLKQALTIVGTLPFTYMLEKWRWMVFKGEIPKDQWMKKWWEMKREIVGVVEPVPHDETYCDPASLFHVSNDYSFIRYYTRTLYQFQFQEALCQAAKHEGPLHKCDISNSTEAGQKLFNMLRLGKSEPWTLALENVVGAKNMNVRPLLNYFEPLFTWLKDQNKNSFVGWSTDWSPYADQSIKVRISLKSALGDKAYEWNDNEMYLFRCSVAYAMRQYFLKVKNQMILFGEEDVRVANLKPRISFNFFVTAPKNVSDIIPRTEVEKAIRMSRSRINDAFRLNDNSLEFLGIQPTLGPPNQPPVSESKYGPPCPPCPAPEFLGGPSVFLFPPKPKDTLMISRDPEVTCVVVDVSQEDPEVQFNWYVDGVEVHNAKTKPREEQFNSTYRVVSVLQVLHQDWLNGKEYKCKVSNKGLPSSIEKTISKAKGQPREPQVYTLPPSQEEMTKNQVSLTCLVKGFYPSDIAVEWESNGQPENNYKTTPPVLDSDGSFFLYSRLTVDKSRWQEGNVFSCSVMHEALHNHYTQKSLSLSLGK

SEQ ID NO: 71 - protein, 944 aa, artificial
  ACE2 18-732 S645C R273A with IgG4 T256D T307Q
QSTIEEQAKTFLDKFNHEAEDLFYQSSLASWNYNTNITEENVQNMNNAGDKWSAFLKEQSTLAQMYPLQEIQNLTVKLQLQALQQNGSSVLSEDKSKRLNTILNTMSTIYSTGKVCNPDNPQECLLLEPGLNEIMANSLDYNERLWAWESWRSEVGKQLRPLYEEYVVLKNEMARANHYEDYGDYWRGDYEVNGVDGYDYSRGQLIEDVEHTFEEIKPLYEHLHAYVRAKLMNAYPSYISPIGCLPAHLLGDMWGAFWTNLYSLTVPFGQKPNIDVTDAMVDQAWDAQRIFKEAEKFFVSVGLPNMTQGFWENSMLTDPGNVQKAVCHPTAWDLGKGDFRILMCTKVTMDDFLTAHHEMGHIQYDMAYAAQPFLLRNGANEGFHEAVGEIMSLSAATPKHLKSIGLLSPDFQEDNETEINFLLKQALTIVGTLPFTYMLEKWRWMVFKGEIPKDQWMKKWWEMKREIVGVVEPVPHDETYCDPASLFHVSNDYSFIRYYTRTLYQFQFQEALCQAAKHEGPLHKCDISNSTEAGQKLFNMLRLGKSEPWTLALENVVGAKNMNVRPLLNYFEPLFTWLKDQNKNSFVGWSTDWSPYADQSIKVRISLKSALGDKAYEWNDNEMYLFRCSVAYAMRQYFLKVKNQMILFGEEDVRVANLKPRISFNFFVTAPKNVSDIIPRTEVEKAIRMSRSRINDAFRLNDNSLEFLGIQPTLGESKYGPPCPPCPAPEFLGGPSVFLFPPKPKDTLMISRDPEVTCVVVDVSQEDPEVQFNWYVDGVEVHNAKTKPREEQFNSTYRVVSVLQVLHQDWLNGKEYKCKVSNKGLPSSIEKTISKAKGQPREPQVYTLPPSQEEMTKNQVSLTCLVKGFYPSDIAVEWESNGQPENNYKTTPPVLDSDGSFFLYSRLTVDKSRWQEGNVFSCSVMHEALHNHYTQKSLSLSLGK

SEQ ID NO: 72 - protein, 952 aa, artificial
  ACE2 18-740 S645C R273A with IgG4 T256D T307Q
QSTIEEQAKTFLDKFNHEAEDLFYQSSLASWNYNTNITEENVQNMNNAGDKWSAFLKEQSTLAQMYPLQEIQNLTVKLQLQALQQNGSSVLSEDKSKRLNTILNTMSTIYSTGKVCNPDNPQECLLLEPGLNEIMANSLDYNERLWAWESWRSEVGKQLRPLYEEYVVLKNEMARANHYEDYGDYWRGDYEVNGVDGYDYSRGQLIEDVEHTFEEIKPLYEHLHAYVRAKLMNAYPSYISPIGCLPAHLLGDMWGAFWTNLYSLTVPFGQKPNIDVTDAMVDQAWDAQRIFKEAEKFFVSVGLPNMTQGFWENSMLTDPGNVQKAVCHPTAWDLGKGDFRILMCTKVTMDDFLTAHHEMGHIQYDMAYAAQPFLLRNGANEGFHEAVGEIMSLSAATPKHLKSIGLLSPDFQEDNETEINFLLKQALTIVGTLPFTYMLEKWRWMVFKGEIPKDQWMKKWWEMKREIVGVVEPVPHDETYCDPASLFHVSNDYSFIRYYTRTLYQFQFQEALCQAAKHEGPLHKCDISNSTEAGQKLFNMLRLGKSEPWTLALENVVGAKNMNVRPLLNYFEPLFTWLKDQNKNSFVGWSTDWSPYADQSIKVRISLKSALGDKAYEWNDNEMYLFRCSVAYAMRQYFLKVKNQMILFGEEDVRVANLKPRISFNFFVTAPKNVSDIIPRTEVEKAIRMSRSRINDAFRLNDNSLEFLGIQPTLGPPNQPPVSESKYGPPCPPCPAPEFLGGPSVFLFPPKPKDTLMISRDPEVTCVVVDVSQEDPEVQFNWYVDGVEVHNAKTKPREEQFNSTYRVVSVLQVLHQDWLNGKEYKCKVSNKGLPSSIEKTISKAKGQPREPQVYTLPPSQEEMTKNQVSLTCLVKGFYPSDIAVEWESNGQPENNYKTTPPVLDSDGSFFLYSRLTVDKSRWQEGNVFSCSVMHEALHNHYTQKSLSLSLGK

SEQ ID NO: 73 - protein, 942 aa, artificial
  ACE2 18-732 with IgG1 T256D T307Q
QSTIEEQAKTFLDKFNHEAEDLFYQSSLASWNYNTNITEENVQNMNNAGDKWSAFLKEQSTLAQMYPLQEIQNLTVKLQLQALQQNGSSVLSEDKSKRLNTILNTMSTIYSTGKVCNPDNPQECLLLEPGLNEIMANSLDYNERLWAWESWRSEVGKQLRPLYEEYVVLKNEMARANHYEDYGDYWRGDYEVNGVDGYDYSRGQLIEDVEHTFEEIKPLYEHLHAYVRAKLMNAYPSYISPIGCLPAHLLGDMWGRFWTNLYSLTVPFGQKPNIDVTDAMVDQAWDAQRIFKEAEKFFVSVGLPNMTQGFWENSMLTDPGNVQKAVCHPTAWDLGKGDFRILMCTKVTMDDFLTAHHEMGHIQYDMAYAAQPFLLRNGANEGFHEAVGEIMSLSAATPKHLKSIGLLSPDFQEDNETEINFLLKQALTIVGTLPFTYMLEKWRWMVFKGEIPKDQWMKKWWEMKREIVGVVEPVPHDETYCDPASLFHVSNDYSFIRYYTRTLYQFQFQEALCQAAKHEGPLHKCDISNSTEAGQKLFNMLRLGKSEPWTLALENVVGAKNMNVRPLLNYFEPLFTWLKDQNKNSFVGWSTDWSPYADQSIKVRISLKSALGDKAYEWNDNEMYLFRSSVAYAMRQYFLKVKNQMILFGEEDVRVANLKPRISFNFFVTAPKNVSDIIPRTEVEKAIRMSRSRINDAFRLNDNSLEFLGIQPTLGDKTHTCPPCPAPELLGGPSVFLFPPKPKDTLMISRDPEVTCVVVDVSHEDPEVKFNWYVDGVEVHNAKTKPREEQYNSTYRVVSVLQVLHQDWLNGKEYKCKVSNKALPAPIEKTISKAKGQPREPQVYTLPPSRDELTKNQVSLTCLVKGFYPSDIAVEWESNGQPENNYKTTPPVLDSDGSFFLYSKLTVDKSRWQQGNVFSCSVMHEALHNHYTQKSLSLSPGK

SEQ ID NO: 74 - protein, 950 aa, artificial
  ACE2 18-740 with IgG1 T256D T307Q
QSTIEEQAKTFLDKFNHEAEDLFYQSSLASWNYNTNITEENVQNMNNAGDKWSAFLKEQSTLAQMYPLQEIQNLTVKLQLQALQQNGSSVLSEDKSKRLNTILNTMSTIYSTGKVCNPDNPQECLLLEPGLNEIMANSLDYNERLWAWESWRSEVGKQLRPLYEEYVVLKNEMARANHYEDYGDYWRGDYEVNGVDGYDYSRGQLIEDVEHTFEEIKPLYEHLHAYVRAKLMNAYPSYISPIGCLPAHLLGDMWGRFWTNLYSLTVPFGQKPNIDVTDAMVDQAWDAQRIFKEAEKFFVSVGLPNMTQGFWENSMLTDPGNVQKAVCHPTAWDLGKGDFRILMCTKVTMDDFLTAHHEMGHIQYDMAYAAQPFLLRNGANEGFHEAVGEIMSLSAATPKHLKSIGLLSPDFQEDNETEINFLLKQALTIVGTLPFTYMLEKWRWMVFKGEIPKDQWMKKWWEMKREIVGVVEPVPHDETYCDPASLFHVSNDYSFIRYYTRTLYQFQFQEALCQAAKHEGPLHKCDISNSTEAGQKLFNMLRLGKSEPWTLALENVVGAKNMNVRPLLNYFEPLFTWLKDQNKNSFVGWSTDWSPYADQSIKVRISLKSALGDKAYEWNDNEMYLFRSSVAYAMRQYFLKVKNQMILFGEEDVRVANLKPRISFNFFVTAPKNVSDIIPRTEVEKAIRMSRSRINDAFRLNDNSLEFLGIQPTLGPPNQPPVSDKTHTCPPCPAPELLGGPSVFLFPPKPKDTLMISRDPEVTCVVVDVSHEDPEVKFNWYVDGVEVHNAKTKPREEQYNSTYRVVSVLQVLHQDWLNGKEYKCKVSNKALPAPIEKTISKAKGQPREPQVYTLPPSRDELTKNQVSLTCLVKGFYPSDIAVEWESNGQPENNYKTTPPVLDSDGSFFLYSKLTVDKSRWQQGNVFSCSVMHEALHNHYTQKSLSLSPGK

SEQ ID NO: 75 - protein, 944 aa, artificial
  ACE2 18-732 with IgG4 T256D T307Q
QSTIEEQAKTFLDKFNHEAEDLFYQSSLASWNYNTNITEENVQNMNNAGDKWSAFLKEQSTLAQMYPLQEIQNLTVKLQLQALQQNGSSVLSEDKSKRLNTILNTMSTIYSTGKVCNPDNPQECLLLEPGLNEIMANSLDYNERLWAWESWRSEVGKQLRPLYEEYVVLKNEMARANHYEDYGDYWRGDYEVNGVDGYDYSRGQLIEDVEHTFEEIKPLYEHLHAYVRAKLMNAYPSYISPIGCLPAHLLGDMWGRFWTNLYSLTVPFGQKPNIDVTDAMVDQAWDAQRIFKEAEKFFVSVGLPNMTQGFWENSMLTDPGNVQKAVCHPTAWDLGKGDFRILMCTKVTMDDFLTAHHEMGHIQYDMAYAAQPFLLRNGANEGFHEAVGEIMSLSAATPKHLKSIGLLSPDFQEDNETEINFLLKQALTIVGTLPFTYMLEKWRWMVFKGEIPKDQWMKKWWEMKREIVGVVEPVPHDETYCDPASLFHVSNDYSFIRYYTRTLYQFQFQEALCQAAKHEGPLHKCDISNSTEAGQKLFNMLRLGKSEPWTLALENVVGAKNMNVRPLLNYFEPLFTWLKDQNKNSFVGWSTDWSPYADQSIKVRISLKSALGDKAYEWNDNEMYLFRSSVAYAMRQYFLKVKNQMILFGEEDVRVANLKPRISFNFFVTAPKNVSDIIPRTEVEKAIRMSRSRINDAFRLNDNSLEFLGIQPTLGESKYGPPCPPCPAPEFLGGPSVFLFPPKPKDTLMISRDPEVTCVVVDVSQEDPEVQFNWYVDGVEVHNAKTKPREEQFNSTYRVVSVLQVLHQDWLNGKEYKCKVSNKGLPSSIEKTISKAKGQPREPQVYTLPPSQEEMTKNQVSLTCLVKGFYPSDIAVEWESNGQPENNYKTTPPVLDSDGSFFLYSRLTVDKSRWQEGNVFSCSVMHEALHNHYTQKSLSLSLGK

SEQ ID NO: 76 - protein, 952 aa, artificial
  ACE2 18-740 with IgG4 T256D T307Q
QSTIEEQAKTFLDKFNHEAEDLFYQSSLASWNYNTNITEENVQNMNNAGDKWSAFLKEQSTLAQMYPLQEIQNLTVKLQLQALQQNGSSVLSEDKSKRLNTILNTMSTIYSTGKVCNPDNPQECLLLEPGLNEIMANSLDYNERLWAWESWRSEVGKQLRPLYEEYVVLKNEMARANHYEDYGDYWRGDYEVNGVDGYDYSRGQLIEDVEHTFEEIKPLYEHLHAYVRAKLMNAYPSYISPIGCLPAHLLGDMWGRFWTNLYSLTVPFGQKPNIDVTDAMVDQAWDAQRIFKEAEKFFVSVGLPNMTQGFWENSMLTDPGNVQKAVCHPTAWDLGKGDFRILMCTKVTMDDFLTAHHEMGHIQYDMAYAAQPFLLRNGANEGFHEAVGEIMSLSAATPKHLKSIGLLSPDFQEDNETEINFLLKQALTIVGTLPFTYMLEKWRWMVFKGEIPKDQWMKKWWEMKREIVGVVEPVPHDETYCDPASLFHVSNDYSFIRYYTRTLYQFQFQEALCQAAKHEGPLHKCDISNSTEAGQKLFNMLRLGKSEPWTLALENVVGAKNMNVRPLLNYFEPLFTWLKDQNKNSFVGWSTDWSPYADQSIKVRISLKSALGDKAYEWNDNEMYLFRSSVAYAMRQYFLKVKNQMILFGEEDVRVANLKPRISFNFFVTAPKNVSDIIPRTEVEKAIRMSRSRINDAFRLNDNSLEFLGIQPTLGPPNQPPVSESKYGPPCPPCPAPEFLGGPSVFLFPPKPKDTLMISRDPEVTCVVVDVSQEDPEVQFNWYVDGVEVHNAKTKPREEQFNSTYRVVSVLQVLHQDWLNGKEYKCKVSNKGLPSSIEKTISKAKGQPREPQVYTLPPSQEEMTKNQVSLTCLVKGFYPSDIAVEWESNGQPENNYKTTPPVLDSDGSFFLYSRLTVDKSRWQEGNVFSCSVMHEALHNHYTQKSLSLSLGK

SEQ ID NO: 77 - protein, 942 aa, artificial
  ACE2 18-732 H374N H378N with IgG1 T256D T307Q
QSTIEEQAKTFLDKFNHEAEDLFYQSSLASWNYNTNITEENVQNMNNAGDKWSAFLKEQSTLAQMYPLQEIQNLTVKLQLQALQQNGSSVLSEDKSKRLNTILNTMSTIYSTGKVCNPDNPQECLLLEPGLNEIMANSLDYNERLWAWESWRSEVGKQLRPLYEEYVVLKNEMARANHYEDYGDYWRGDYEVNGVDGYDYSRGQLIEDVEHTFEEIKPLYEHLHAYVRAKLMNAYPSYISPIGCLPAHLLGDMWGRFWTNLYSLTVPFGQKPNIDVTDAMVDQAWDAQRIFKEAEKFFVSVGLPNMTQGFWENSMLTDPGNVQKAVCHPTAWDLGKGDFRILMCTKVTMDDFLTAHNEMGNIQYDMAYAAQPFLLRNGANEGFHEAVGEIMSLSAATPKHLKSIGLLSPDFQEDNETEINFLLKQALTIVGTLPFTYMLEKWRWMVFKGEIPKDQWMKKWWEMKREIVGVVEPVPHDETYCDPASLFHVSNDYSFIRYYTRTLYQFQFQEALCQAAKHEGPLHKCDISNSTEAGQKLFNMLRLGKSEPWTLALENVVGAKNMNVRPLLNYFEPLFTWLKDQNKNSFVGWSTDWSPYADQSIKVRISLKSALGDKAYEWNDNEMYLFRSSVAYAMRQYFLKVKNQMILFGEEDVRVANLKPRISFNFFVTAPKNVSDIIPRTEVEKAIRMSRSRINDAFRLNDNSLEFLGIQPTLGDKTHTCPPCPAPELLGGPSVFLFPPKPKDTLMISRDPEVTCVVVDVSHEDPEVKFNWYVDGVEVHNAKTKPREEQYNSTYRVVSVLQVLHQDWLNGKEYKCKVSNKALPAPIEKTISKAKGQPREPQVYTLPPSRDELTKNQVSLTCLVKGFYPSDIAVEWESNGQPENNYKTTPPVLDSDGSFFLYSKLTVDKSRWQQGNVFSCSVMHEALHNHYTQKSLSLSPGK

SEQ ID NO: 78 - protein, 950 aa, artificial
  ACE2 18-740 H374N H378N with IgG1 T256D T307Q
QSTIEEQAKTFLDKFNHEAEDLFYQSSLASWNYNTNITEENVQNMNNAGDKWSAFLKEQSTLAQMYPLQEIQNLTVKLQLQALQQNGSSVLSEDKSKRLNTILNTMSTIYSTGKVCNPDNPQECLLLEPGLNEIMANSLDYNERLWAWESWRSEVGKQLRPLYEEYVVLKNEMARANHYEDYGDYWRGDYEVNGVDGYDYSRGQLIEDVEHTFEEIKPLYEHLHAYVRAKLMNAYPSYISPIGCLPAHLLGDMWGRFWTNLYSLTVPFGQKPNIDVTDAMVDQAWDAQRIFKEAEKFFVSVGLPNMTQGFWENSMLTDPGNVQKAVCHPTAWDLGKGDFRILMCTKVTMDDFLTAHNEMGNIQYDMAYAAQPFLLRNGANEGFHEAVGEIMSLSAATPKHLKSIGLLSPDFQEDNETEINFLLKQALTIVGTLPFTYMLEKWRWMVFKGEIPKDQWMKKWWEMKREIVGVVEPVPHDETYCDPASLFHVSNDYSFIRYYTRTLYQFQFQEALCQAAKHEGPLHKCDISNSTEAGQKLFNMLRLGKSEPWTLALENVVGAKNMNVRPLLNYFEPLFTWLKDQNKNSFVGWSTDWSPYADQSIKVRISLKSALGDKAYEWNDNEMYLFRSSVAYAMRQYFLKVKNQMILFGEEDVRVANLKPRISFNFFVTAPKNVSDIIPRTEVEKAIRMSRSRINDAFRLNDNSLEFLGIQPTLGPPNQPPVSDKTHTCPPCPAPELLGGPSVFLFPPKPKDTLMISRDPEVTCVVVDVSHEDPEVKFNWYVDGVEVHNAKTKPREEQYNSTYRVVSVLQVLHQDWLNGKEYKCKVSNKALPAPIEKTISKAKGQPREPQVYTLPPSRDELTKNQVSLTCLVKGFYPSDIAVEWESNGQPENNYKTTPPVLDSDGSFFLYSKLTVDKSRWQQGNVFSCSVMHEALHNHYTQKSLSLSPGK

SEQ ID NO: 79 - protein, 944 aa, artificial
  ACE2 18-732 H374N H378N with IgG4 T256D T307Q
QSTIEEQAKTFLDKFNHEAEDLFYQSSLASWNYNTNITEENVQNMNNAGDKWSAFLKEQSTLAQMYPLQEIQNLTVKLQLQALQQNGSSVLSEDKSKRLNTILNTMSTIYSTGKVCNPDNPQECLLLEPGLNEIMANSLDYNERLWAWESWRSEVGKQLRPLYEEYVVLKNEMARANHYEDYGDYWRGDYEVNGVDGYDYSRGQLIEDVEHTFEEIKPLYEHLHAYVRAKLMNAYPSYISPIGCLPAHLLGDMWGRFWTNLYSLTVPFGQKPNIDVTDAMVDQAWDAQRIFKEAEKFFVSVGLPNMTQGFWENSMLTDPGNVQKAVCHPTAWDLGKGDFRILMCTKVTMDDFLTAHNEMGNIQYDMAYAAQPFLLRNGANEGFHEAVGEIMSLSAATPKHLKSIGLLSPDFQEDNETEINFLLKQALTIVGTLPFTYMLEKWRWMVFKGEIPKDQWMKKWWEMKREIVGVVEPVPHDETYCDPASLFHVSNDYSFIRYYTRTLYQFQFQEALCQAAKHEGPLHKCDISNSTEAGQKLFNMLRLGKSEPWTLALENVVGAKNMNVRPLLNYFEPLFTWLKDQNKNSFVGWSTDWSPYADQSIKVRISLKSALGDKAYEWNDNEMYLFRSSVAYAMRQYFLKVKNQMILFGEEDVRVANLKPRISFNFFVTAPKNVSDIIPRTEVEKAIRMSRSRINDAFRLNDNSLEFLGIQPTLGESKYGPPCPPCPAPEFLGGPSVFLFPPKPKDTLMISRDPEVTCVVVDVSQEDPEVQFNWYVDGVEVHNAKTKPREEQFNSTYRVVSVLQVLHQDWLNGKEYKCKVSNKGLPSSIEKTISKAKGQPREPQVYTLPPSQEEMTKNQVSLTCLVKGFYPSDIAVEWESNGQPENNYKTTPPVLDSDGSFFLYSRLTVDKSRWQEGNVFSCSVMHEALHNHYTQKSLSLSLGK

SEQ ID NO: 80 - protein, 952 aa, artificial
  ACE2 18-740 H374N H378N with IgG4 T256D T 307Q
QSTIEEQAKTFLDKFNHEAEDLFYQSSLASWNYNTNITEENVQNMNNAGDKWSAFLKEQSTLAQMYPLQEIQNLTVKLQLQALQQNGSSVLSEDKSKRLNTILNTMSTIYSTGKVCNPDNPQECLLLEPGLNEIMANSLDYNERLWAWESWRSEVGKQLRPLYEEYVVLKNEMARANHYEDYGDYWRGDYEVNGVDGYDYSRGQLIEDVEHTFEEIKPLYEHLHAYVRAKLMNAYPSYISPIGCLPAHLLGDMWGRFWTNLYSLTVPFGQKPNIDVTDAMVDQAWDAQRIFKEAEKFFVSVGLPNMTQGFWENSMLTDPGNVQKAVCHPTAWDLGKGDFRILMCTKVTMDDFLTAHNEMGNIQYDMAYAAQPFLLRNGANEGFHEAVGEIMSLSAATPKHLKSIGLLSPDFQEDNETEINFLLKQALTIVGTLPFTYMLEKWRWMVFKGEIPKDQWMKKWWEMKREIVGVVEPVPHDETYCDPASLFHVSNDYSFIRYYTRTLYQFQFQEALCQAAKHEGPLHKCDISNSTEAGQKLFNMLRLGKSEPWTLALENVVGAKNMNVRPLLNYFEPLFTWLKDQNKNSFVGWSTDWSPYADQSIKVRISLKSALGDKAYEWNDNEMYLFRSSVAYAMRQYFLKVKNQMILFGEEDVRVANLKPRISFNFFVTAPKNVSDIIPRTEVEKAIRMSRSRINDAFRLNDNSLEFLGIQPTLGPPNQPPVSESKYGPPCPPCPAPEFLGGPSVFLFPPKPKDTLMISRDPEVTCVVVDVSQEDPEVQFNWYVDGVEVHNAKTKPREEQFNSTYRVVSVLQVLHQDWLNGKEYKCKVSNKGLPSSIEKTISKAKGQPREPQVYTLPPSQEEMTKNQVSLTCLVKGFYPSDIAVEWESNGQPENNYKTTPPVLDSDGSFFLYSRLTVDKSRWQEGNVFSCSVMHEALHNHYTQKSLSLSLGK

SEQ ID NO: 81 - protein, 942 aa, artificial
  ACE2 18-732 R273A with IgG1 T256D T307Q
QSTIEEQAKTFLDKFNHEAEDLFYQSSLASWNYNTNITEENVQNMNNAGDKWSAFLKEQSTLAQMYPLQEIQNLTVKLQLQALQQNGSSVLSEDKSKRLNTILNTMSTIYSTGKVCNPDNPQECLLLEPGLNEIMANSLDYNERLWAWESWRSEVGKQLRPLYEEYVVLKNEMARANHYEDYGDYWRGDYEVNGVDGYDYSRGQLIEDVEHTFEEIKPLYEHLHAYVRAKLMNAYPSYISPIGCLPAHLLGDMWGAFWTNLYSLTVPFGQKPNIDVTDAMVDQAWDAQRIFKEAEKFFVSVGLPNMTQGFWENSMLTDPGNVQKAVCHPTAWDLGKGDFRILMCTKVTMDDFLTAHHEMGHIQYDMAYAAQPFLLRNGANEGFHEAVGEIMSLSAATPKHLKSIGLLSPDFQEDNETEINFLLKQALTIVGTLPFTYMLEKWRWMVFKGEIPKDQWMKKWWEMKREIVGVVEPVPHDETYCDPASLFHVSNDYSFIRYYTRTLYQFQFQEALCQAAKHEGPLHKCDISNSTEAGQKLFNMLRLGKSEPWTLALENVVGAKNMNVRPLLNYFEPLFTWLKDQNKNSFVGWSTDWSPYADQSIKVRISLKSALGDKAYEWNDNEMYLFRSSVAYAMRQYFLKVKNQMILFGEEDVRVANLKPRISFNFFVTAPKNVSDIIPRTEVEKAIRMSRSRINDAFRLNDNSLEFLGIQPTLGDKTHTCPPCPAPELLGGPSVFLFPPKPKDTLMISRDPEVTCVVVDVSHEDPEVKFNWYVDGVEVHNAKTKPREEQYNSTYRVVSVLQVLHQDWLNGKEYKCKVSNKALPAPIEKTISKAKGQPREPQVYTLPPSRDELTKNQVSLTCLVKGFYPSDIAVEWESNGQPENNYKTTPPVLDSDGSFFLYSKLTVDKSRWQQGNVFSCSVMHEALHNHYTQKSLSLSPGK

SEQ ID NO: 82 - protein, 950 aa, artificial
  ACE2 18-740 R273A with IgG1 T256D T307Q
QSTIEEQAKTFLDKFNHEAEDLFYQSSLASWNYNTNITEENVQNMNNAGDKWSAFLKEQSTLAQMYPLQEIQNLTVKLQLQALQQNGSSVLSEDKSKRLNTILNTMSTIYSTGKVCNPDNPQECLLLEPGLNEIMANSLDYNERLWAWESWRSEVGKQLRPLYEEYVVLKNEMARANHYEDYGDYWRGDYEVNGVDGYDYSRGQLIEDVEHTFEEIKPLYEHLHAYVRAKLMNAYPSYISPIGCLPAHLLGDMWGAFWTNLYSLTVPFGQKPNIDVTDAMVDQAWDAQRIFKEAEKFFVSVGLPNMTQGFWENSMLTDPGNVQKAVCHPTAWDLGKGDFRILMCTKVTMDDFLTAHHEMGHIQYDMAYAAQPFLLRNGANEGFHEAVGEIMSLSAATPKHLKSIGLLSPDFQEDNETEINFLLKQALTIVGTLPFTYMLEKWRWMVFKGEIPKDQWMKKWWEMKREIVGVVEPVPHDETYCDPASLFHVSNDYSFIRYYTRTLYQFQFQEALCQAAKHEGPLHKCDISNSTEAGQKLFNMLRLGKSEPWTLALENVVGAKNMNVRPLLNYFEPLFTWLKDQNKNSFVGWSTDWSPYADQSIKVRISLKSALGDKAYEWNDNEMYLFRSSVAYAMRQYFLKVKNQMILFGEEDVRVANLKPRISFNFFVTAPKNVSDIIPRTEVEKAIRMSRSRINDAFRLNDNSLEFLGIQPTLGPPNQPPVSDKTHTCPPCPAPELLGGPSVFLFPPKPKDTLMISRDPEVTCVVVDVSHEDPEVKFNWYVDGVEVHNAKTKPREEQYNSTYRVVSVLQVLHQDWLNGKEYKCKVSNKALPAPIEKTISKAKGQPREPQVYTLPPSRDELTKNQVSLTCLVKGFYPSDIAVEWESNGQPENNYKTTPPVLDSDGSFFLYSKLTVDKSRWQQGNVFSCSVMHEALHNHYTQKSLSLSPGK

SEQ ID NO: 83 - protein, 944 aa, artificial
  ACE2 18-732 R273A with IgG4 T256D T307Q
QSTIEEQAKTFLDKFNHEAEDLFYQSSLASWNYNTNITEENVQNMNNAGDKWSAFLKEQSTLAQMYPLQEIQNLTVKLQLQALQQNGSSVLSEDKSKRLNTILNTMSTIYSTGKVCNPDNPQECLLLEPGLNEIMANSLDYNERLWAWESWRSEVGKQLRPLYEEYVVLKNEMARANHYEDYGDYWRGDYEVNGVDGYDYSRGQLIEDVEHTFEEIKPLYEHLHAYVRAKLMNAYPSYISPIGCLPAHLLGDMWGAFWTNLYSLTVPFGQKPNIDVTDAMVDQAWDAQRIFKEAEKFFVSVGLPNMTQGFWENSMLTDPGNVQKAVCHPTAWDLGKGDFRILMCTKVTMDDFLTAHHEMGHIQYDMAYAAQPFLLRNGANEGFHEAVGEIMSLSAATPKHLKSIGLLSPDFQEDNETEINFLLKQALTIVGTLPFTYMLEKWRWMVFKGEIPKDQWMKKWWEMKREIVGVVEPVPHDETYCDPASLFHVSNDYSFIRYYTRTLYQFQFQEALCQAAKHEGPLHKCDISNSTEAGQKLFNMLRLGKSEPWTLALENVVGAKNMNVRPLLNYFEPLFTWLKDQNKNSFVGWSTDWSPYADQSIKVRISLKSALGDKAYEWNDNEMYLFRSSVAYAMRQYFLKVKNQMILFGEEDVRVANLKPRISFNFFVTAPKNVSDIIPRTEVEKAIRMSRSRINDAFRLNDNSLEFLGIQPTLGESKYGPPCPPCPAPEFLGGPSVFLFPPKPKDTLMISRDPEVTCVVVDVSQEDPEVQFNWYVDGVEVHNAKTKPREEQFNSTYRVVSVLQVLHQDWLNGKEYKCKVSNKGLPSSIEKTISKAKGQPREPQVYTLPPSQEEMTKNQVSLTCLVKGFYPSDIAVEWESNGQPENNYKTTPPVLDSDGSFFLYSRLTVDKSRWQEGNVFSCSVMHEALHNHYTQKSLSLSLGK

SEQ ID NO: 84 - protein, 952 aa, artificial
  ACE2 18-740 R273A with IgG4 T256D T307Q
QSTIEEQAKTFLDKFNHEAEDLFYQSSLASWNYNTNITEENVQNMNNAGDKWSAFLKEQSTLAQMYPLQEIQNLTVKLQLQALQQNGSSVLSEDKSKRLNTILNTMSTIYSTGKVCNPDNPQECLLLEPGLNEIMANSLDYNERLWAWESWRSEVGKQLRPLYEEYVVLKNEMARANHYEDYGDYWRGDYEVNGVDGYDYSRGQLIEDVEHTFEEIKPLYEHLHAYVRAKLMNAYPSYISPIGCLPAHLLGDMWGAFWTNLYSLTVPFGQKPNIDVTDAMVDQAWDAQRIFKEAEKFFVSVGLPNMTQGFWENSMLTDPGNVQKAVCHPTAWDLGKGDFRILMCTKVTMDDFLTAHHEMGHIQYDMAYAAQPFLLRNGANEGFHEAVGEIMSLSAATPKHLKSIGLLSPDFQEDNETEINFLLKQALTIVGTLPFTYMLEKWRWMVFKGEIPKDQWMKKWWEMKREIVGVVEPVPHDETYCDPASLFHVSNDYSFIRYYTRTLYQFQFQEALCQAAKHEGPLHKCDISNSTEAGQKLFNMLRLGKSEPWTLALENVVGAKNMNVRPLLNYFEPLFTWLKDQNKNSFVGWSTDWSPYADQSIKVRISLKSALGDKAYEWNDNEMYLFRSSVAYAMRQYFLKVKNQMILFGEEDVRVANLKPRISFNFFVTAPKNVSDIIPRTEVEKAIRMSRSRINDAFRLNDNSLEFLGIQPTLGPPNQPPVSESKYGPPCPPCPAPEFLGGPSVFLFPPKPKDTLMISRDPEVTCVVVDVSQEDPEVQFNWYVDGVEVHNAKTKPREEQFNSTYRVVSVLQVLHQDWLNGKEYKCKVSNKGLPSSIEKTISKAKGQPREPQVYTLPPSQEEMTKNQVSLTCLVKGFYPSDIAVEWESNGQPENNYKTTPPVLDSDGSFFLYSRLTVDKSRWQEGNVFSCSVMHEALHNHYTQKSLSLSLGK

SEQ ID NO: 85 - protein, 942 aa, artificial
  ACE2 18-732 R273A with IgG1 wt
QSTIEEQAKTFLDKFNHEAEDLFYQSSLASWNYNTNITEENVQNMNNAGDKWSAFLKEQSTLAQMYPLQEIQNLTVKLQLQALQQNGSSVLSEDKSKRLNTILNTMSTIYSTGKVCNPDNPQECLLLEPGLNEIMANSLDYNERLWAWESWRSEVGKQLRPLYEEYVVLKNEMARANHYEDYGDYWRGDYEVNGVDGYDYSRGQLIEDVEHTFEEIKPLYEHLHAYVRAKLMNAYPSYISPIGCLPAHLLGDMWGAFWTNLYSLTVPFGQKPNIDVTDAMVDQAWDAQRIFKEAEKFFVSVGLPNMTQGFWENSMLTDPGNVQKAVCHPTAWDLGKGDFRILMCTKVTMDDFLTAHHEMGHIQYDMAYAAQPFLLRNGANEGFHEAVGEIMSLSAATPKHLKSIGLLSPDFQEDNETEINFLLKQALTIVGTLPFTYMLEKWRWMVFKGEIPKDQWMKKWWEMKREIVGVVEPVPHDETYCDPASLFHVSNDYSFIRYYTRTLYQFQFQEALCQAAKHEGPLHKCDISNSTEAGQKLFNMLRLGKSEPWTLALENVVGAKNMNVRPLLNYFEPLFTWLKDQNKNSFVGWSTDWSPYADQSIKVRISLKSALGDKAYEWNDNEMYLFRSSVAYAMRQYFLKVKNQMILFGEEDVRVANLKPRISFNFFVTAPKNVSDIIPRTEVEKAIRMSRSRINDAFRLNDNSLEFLGIQPTLGDKTHTCPPCPAPELLGGPSVFLFPPKPKDTLMISRTPEVTCVVVDVSHEDPEVKFNWYVDGVEVHNAKTKPREEQYNSTYRVVSVLTVLHQDWLNGKEYKCKVSNKALPAPIEKTISKAKGQPREPQVYTLPPSRDELTKNQVSLTCLVKGFYPSDIAVEWESNGQPENNYKTTPPVLDSDGSFFLYSKLTVDKSRWQQGNVFSCSVMHEALHNHYTQKSLSLSPGK

SEQ ID NO: 86 - protein, 950 aa, artificial
  ACE2 18-740 R273A with IgG1 wt
QSTIEEQAKTFLDKFNHEAEDLFYQSSLASWNYNTNITEENVQNMNNAGDKWSAFLKEQSTLAQMYPLQEIQNLTVKLQLQALQQNGSSVLSEDKSKRLNTILNTMSTIYSTGKVCNPDNPQECLLLEPGLNEIMANSLDYNERLWAWESWRSEVGKQLRPLYEEYVVLKNEMARANHYEDYGDYWRGDYEVNGVDGYDYSRGQLIEDVEHTFEEIKPLYEHLHAYVRAKLMNAYPSYISPIGCLPAHLLGDMWGAFWTNLYSLTVPFGQKPNIDVTDAMVDQAWDAQRIFKEAEKFFVSVGLPNMTQGFWENSMLTDPGNVQKAVCHPTAWDLGKGDFRILMCTKVTMDDFLTAHHEMGHIQYDMAYAAQPFLLRNGANEGFHEAVGEIMSLSAATPKHLKSIGLLSPDFQEDNETEINFLLKQALTIVGTLPFTYMLEKWRWMVFKGEIPKDQWMKKWWEMKREIVGVVEPVPHDETYCDPASLFHVSNDYSFIRYYTRTLYQFQFQEALCQAAKHEGPLHKCDISNSTEAGQKLFNMLRLGKSEPWTLALENVVGAKNMNVRPLLNYFEPLFTWLKDQNKNSFVGWSTDWSPYADQSIKVRISLKSALGDKAYEWNDNEMYLFRSSVAYAMRQYFLKVKNQMILFGEEDVRVANLKPRISFNFFVTAPKNVSDIIPRTEVEKAIRMSRSRINDAFRLNDNSLEFLGIQPTLGPPNQPPVSDKTHTCPPCPAPELLGGPSVFLFPPKPKDTLMISRTPEVTCVVVDVSHEDPEVKFNWYVDGVEVHNAKTKPREEQYNSTYRVVSVLTVLHQDWLNGKEYKCKVSNKALPAPIEKTISKAKGQPREPQVYTLPPSRDELTKNQVSLTCLVKGFYPSDIAVEWESNGQPENNYKTTPPVLDSDGSFFLYSKLTVDKSRWQQGNVFSCSVMHEALHNHYTQKSLSLSPGK

SEQ ID NO: 87 - protein, 944 aa, artificial
  ACE2 18-732 R273A with IgG4 wt
QSTIEEQAKTFLDKFNHEAEDLFYQSSLASWNYNTNITEENVQNMNNAGDKWSAFLKEQSTLAQMYPLQEIQNLTVKLQLQALQQNGSSVLSEDKSKRLNTILNTMSTIYSTGKVCNPDNPQECLLLEPGLNEIMANSLDYNERLWAWESWRSEVGKQLRPLYEEYVVLKNEMARANHYEDYGDYWRGDYEVNGVDGYDYSRGQLIEDVEHTFEEIKPLYEHLHAYVRAKLMNAYPSYISPIGCLPAHLLGDMWGAFWTNLYSLTVPFGQKPNIDVTDAMVDQAWDAQRIFKEAEKFFVSVGLPNMTQGFWENSMLTDPGNVQKAVCHPTAWDLGKGDFRILMCTKVTMDDFLTAHHEMGHIQYDMAYAAQPFLLRNGANEGFHEAVGEIMSLSAATPKHLKSIGLLSPDFQEDNETEINFLLKQALTIVGTLPFTYMLEKWRWMVFKGEIPKDQWMKKWWEMKREIVGVVEPVPHDETYCDPASLFHVSNDYSFIRYYTRTLYQFQFQEALCQAAKHEGPLHKCDISNSTEAGQKLFNMLRLGKSEPWTLALENVVGAKNMNVRPLLNYFEPLFTWLKDQNKNSFVGWSTDWSPYADQSIKVRISLKSALGDKAYEWNDNEMYLFRSSVAYAMRQYFLKVKNQMILFGEEDVRVANLKPRISFNFFVTAPKNVSDIIPRTEVEKAIRMSRSRINDAFRLNDNSLEFLGIQPTLGESKYGPPCPPCPAPEFLGGPSVFLFPPKPKDTLMISRTPEVTCVVVDVSQEDPEVQFNWYVDGVEVHNAKTKPREEQFNSTYRVVSVLTVLHQDWLNGKEYKCKVSNKGLPSSIEKTISKAKGQPREPQVYTLPPSQEEMTKNQVSLTCLVKGFYPSDIAVEWESNGQPENNYKTTPPVLDSDGSFFLYSRLTVDKSRWQEGNVFSCSVMHEALHNHYTQKSLSLSLGK

SEQ ID NO: 88 - protein, 952 aa, artificial
  ACE2 18-740 R273A with IgG4 wt
QSTIEEQAKTFLDKFNHEAEDLFYQSSLASWNYNTNITEENVQNMNNAGDKWSAFLKEQSTLAQMYPLQEIQNLTVKLQLQALQQNGSSVLSEDKSKRLNTILNTMSTIYSTGKVCNPDNPQECLLLEPGLNEIMANSLDYNERLWAWESWRSEVGKQLRPLYEEYVVLKNEMARANHYEDYGDYWRGDYEVNGVDGYDYSRGQLIEDVEHTFEEIKPLYEHLHAYVRAKLMNAYPSYISPIGCLPAHLLGDMWGAFWTNLYSLTVPFGQKPNIDVTDAMVDQAWDAQRIFKEAEKFFVSVGLPNMTQGFWENSMLTDPGNVQKAVCHPTAWDLGKGDFRILMCTKVTMDDFLTAHHEMGHIQYDMAYAAQPFLLRNGANEGFHEAVGEIMSLSAATPKHLKSIGLLSPDFQEDNETEINFLLKQALTIVGTLPFTYMLEKWRWMVFKGEIPKDQWMKKWWEMKREIVGVVEPVPHDETYCDPASLFHVSNDYSFIRYYTRTLYQFQFQEALCQAAKHEGPLHKCDISNSTEAGQKLFNMLRLGKSEPWTLALENVVGAKNMNVRPLLNYFEPLFTWLKDQNKNSFVGWSTDWSPYADQSIKVRISLKSALGDKAYEWNDNEMYLFRSSVAYAMRQYFLKVKNQMILFGEEDVRVANLKPRISFNFFVTAPKNVSDIIPRTEVEKAIRMSRSRINDAFRLNDNSLEFLGIQPTLGPPNQPPVSESKYGPPCPPCPAPEFLGGPSVFLFPPKPKDTLMISRTPEVTCVVVDVSQEDPEVQFNWYVDGVEVHNAKTKPREEQFNSTYRVVSVLTVLHQDWLNGKEYKCKVSNKGLPSSIEKTISKAKGQPREPQVYTLPPSQEEMTKNQVSLTCLVKGFYPSDIAVEWESNGQPENNYKTTPPVLDSDGSFFLYSRLTVDKSRWQEGNVFSCSVMHEALHNHYTQKSLSLSLGK

SEQ ID NO: 89 - protein, 944 aa, artificial
  ACE2 18-732 R273A with IgG4 YTE
QSTIEEQAKTFLDKFNHEAEDLFYQSSLASWNYNTNITEENVQNMNNAGDKWSAFLKEQSTLAQMYPLQEIQNLTVKLQLQALQQNGSSVLSEDKSKRLNTILNTMSTIYSTGKVCNPDNPQECLLLEPGLNEIMANSLDYNERLWAWESWRSEVGKQLRPLYEEYVVLKNEMARANHYEDYGDYWRGDYEVNGVDGYDYSRGQLIEDVEHTFEEIKPLYEHLHAYVRAKLMNAYPSYISPIGCLPAHLLGDMWGAFWTNLYSLTVPFGQKPNIDVTDAMVDQAWDAQRIFKEAEKFFVSVGLPNMTQGFWENSMLTDPGNVQKAVCHPTAWDLGKGDFRILMCTKVTMDDFLTAHHEMGHIQYDMAYAAQPFLLRNGANEGFHEAVGEIMSLSAATPKHLKSIGLLSPDFQEDNETEINFLLKQALTIVGTLPFTYMLEKWRWMVFKGEIPKDQWMKKWWEMKREIVGVVEPVPHDETYCDPASLFHVSNDYSFIRYYTRTLYQFQFQEALCQAAKHEGPLHKCDISNSTEAGQKLFNMLRLGKSEPWTLALENVVGAKNMNVRPLLNYFEPLFTWLKDQNKNSFVGWSTDWSPYADQSIKVRISLKSALGDKAYEWNDNEMYLFRSSVAYAMRQYFLKVKNQMILFGEEDVRVANLKPRISFNFFVTAPKNVSDIIPRTEVEKAIRMSRSRINDAFRLNDNSLEFLGIQPTLGESKYGPPCPPCPAPEFLGGPSVFLFPPKPKDTLYITREPEVTCVVVDVSQEDPEVQFNWYVDGVEVHNAKTKPREEQFNSTYRVVSVLTVLHQDWLNGKEYKCKVSNKGLPSSIEKTISKAKGQPREPQVYTLPPSQEEMTKNQVSLTCLVKGFYPSDIAVEWESNGQPENNYKTTPPVLDSDGSFFLYSRLTVDKSRWQEGNVFSCSVMHEALHNHYTQKSLSLSLGK

SEQ ID NO: 90 - protein, 952 aa, artificial
  ACE2 18-740 R273A with IgG4 YTE
QSTIEEQAKTFLDKFNHEAEDLFYQSSLASWNYNTNITEENVQNMNNAGDKWSAFLKEQSTLAQMYPLQEIQNLTVKLQLQALQQNGSSVLSEDKSKRLNTILNTMSTIYSTGKVCNPDNPQECLLLEPGLNEIMANSLDYNERLWAWESWRSEVGKQLRPLYEEYVVLKNEMARANHYEDYGDYWRGDYEVNGVDGYDYSRGQLIEDVEHTFEEIKPLYEHLHAYVRAKLMNAYPSYISPIGCLPAHLLGDMWGAFWTNLYSLTVPFGQKPNIDVTDAMVDQAWDAQRIFKEAEKFFVSVGLPNMTQGFWENSMLTDPGNVQKAVCHPTAWDLGKGDFRILMCTKVTMDDFLTAHHEMGHIQYDMAYAAQPFLLRNGANEGFHEAVGEIMSLSAATPKHLKSIGLLSPDFQEDNETEINFLLKQALTIVGTLPFTYMLEKWRWMVFKGEIPKDQWMKKWWEMKREIVGVVEPVPHDETYCDPASLFHVSNDYSFIRYYTRTLYQFQFQEALCQAAKHEGPLHKCDISNSTEAGQKLFNMLRLGKSEPWTLALENVVGAKNMNVRPLLNYFEPLFTWLKDQNKNSFVGWSTDWSPYADQSIKVRISLKSALGDKAYEWNDNEMYLFRSSVAYAMRQYFLKVKNQMILFGEEDVRVANLKPRISFNFFVTAPKNVSDIIPRTEVEKAIRMSRSRINDAFRLNDNSLEFLGIQPTLGPPNQPPVSESKYGPPCPPCPAPEFLGGPSVFLFPPKPKDTLYITREPEVTCVVVDVSQEDPEVQFNWYVDGVEVHNAKTKPREEQFNSTYRVVSVLTVLHQDWLNGKEYKCKVSNKGLPSSIEKTISKAKGQPREPQVYTLPPSQEEMTKNQVSLTCLVKGFYPSDIAVEWESNGQPENNYKTTPPVLDSDGSFFLYSRLTVDKSRWQEGNVFSCSVMHEALHNHYTQKSLSLSLGK

SEQ ID NO: 91 - protein, 715 aa, artificial
  ACE2 18-732 H374N H378N
QSTIEEQAKTFLDKFNHEAEDLFYQSSLASWNYNTNITEENVQNMNNAGDKWSAFLKEQSTLAQMYPLQEIQNLTVKLQLQALQQNGSSVLSEDKSKRLNTILNTMSTIYSTGKVCNPDNPQECLLLEPGLNEIMANSLDYNERLWAWESWRSEVGKQLRPLYEEYVVLKNEMARANHYEDYGDYWRGDYEVNGVDGYDYSRGQLIEDVEHTFEEIKPLYEHLHAYVRAKLMNAYPSYISPIGCLPAHLLGDMWGRFWTNLYSLTVPFGQKPNIDVTDAMVDQAWDAQRIFKEAEKFFVSVGLPNMTQGFWENSMLTDPGNVQKAVCHPTAWDLGKGDFRILMCTKVTMDDFLTAHNEMGNIQYDMAYAAQPFLLRNGANEGFHEAVGEIMSLSAATPKHLKSIGLLSPDFQEDNETEINFLLKQALTIVGTLPFTYMLEKWRWMVFKGEIPKDQWMKKWWEMKREIVGVVEPVPHDETYCDPASLFHVSNDYSFIRYYTRTLYQFQFQEALCQAAKHEGPLHKCDISNSTEAGQKLFNMLRLGKSEPWTLALENVVGAKNMNVRPLLNYFEPLFTWLKDQNKNSFVGWSTDWSPYADQSIKVRISLKSALGDKAYEWNDNEMYLFRSSVAYAMRQYFLKVKNQMILFGEEDVRVANLKPRISFNFFVTAPKNVSDIIPRTEVEKAIRMSRSRINDAFRLNDNSLEFLGIQPTLG

SEQ ID NO: 92 - protein, 723 aa, artificial
  ACE2 18-740 H374N H378N
QSTIEEQAKTFLDKFNHEAEDLFYQSSLASWNYNTNITEENVQNMNNAGDKWSAFLKEQSTLAQMYPLQEIQNLTVKLQLQALQQNGSSVLSEDKSKRLNTILNTMSTIYSTGKVCNPDNPQECLLLEPGLNEIMANSLDYNERLWAWESWRSEVGKQLRPLYEEYVVLKNEMARANHYEDYGDYWRGDYEVNGVDGYDYSRGQLIEDVEHTFEEIKPLYEHLHAYVRAKLMNAYPSYISPIGCLPAHLLGDMWGRFWTNLYSLTVPFGQKPNIDVTDAMVDQAWDAQRIFKEAEKFFVSVGLPNMTQGFWENSMLTDPGNVQKAVCHPTAWDLGKGDFRILMCTKVTMDDFLTAHNEMGNIQYDMAYAAQPFLLRNGANEGFHEAVGEIMSLSAATPKHLKSIGLLSPDFQEDNETEINFLLKQALTIVGTLPFTYMLEKWRWMVFKGEIPKDQWMKKWWEMKREIVGVVEPVPHDETYCDPASLFHVSNDYSFIRYYTRTLYQFQFQEALCQAAKHEGPLHKCDISNSTEAGQKLFNMLRLGKSEPWTLALENVVGAKNMNVRPLLNYFEPLFTWLKDQNKNSFVGWSTDWSPYADQSIKVRISLKSALGDKAYEWNDNEMYLFRSSVAYAMRQYFLKVKNQMILFGEEDVRVANLKPRISFNFFVTAPKNVSDIIPRTEVEKAIRMSRSRINDAFRLNDNSLEFLGIQPTLGPPNQPPVS

SEQ ID NO: 93 - protein, 944 aa, artificial
  ACE2 18-732 with IgG4 YTE
QSTIEEQAKTFLDKFNHEAEDLFYQSSLASWNYNTNITEENVQNMNNAGDKWSAFLKEQSTLAQMYPLQEIQNLTVKLQLQALQQNGSSVLSEDKSKRLNTILNTMSTIYSTGKVCNPDNPQECLLLEPGLNEIMANSLDYNERLWAWESWRSEVGKQLRPLYEEYVVLKNEMARANHYEDYGDYWRGDYEVNGVDGYDYSRGQLIEDVEHTFEEIKPLYEHLHAYVRAKLMNAYPSYISPIGCLPAHLLGDMWGRFWTNLYSLTVPFGQKPNIDVTDAMVDQAWDAQRIFKEAEKFFVSVGLPNMTQGFWENSMLTDPGNVQKAVCHPTAWDLGKGDFRILMCTKVTMDDFLTAHHEMGHIQYDMAYAAQPFLLRNGANEGFHEAVGEIMSLSAATPKHLKSIGLLSPDFQEDNETEINFLLKQALTIVGTLPFTYMLEKWRWMVFKGEIPKDQWMKKWWEMKREIVGVVEPVPHDETYCDPASLFHVSNDYSFIRYYTRTLYQFQFQEALCQAAKHEGPLHKCDISNSTEAGQKLFNMLRLGKSEPWTLALENVVGAKNMNVRPLLNYFEPLFTWLKDQNKNSFVGWSTDWSPYADQSIKVRISLKSALGDKAYEWNDNEMYLFRSSVAYAMRQYFLKVKNQMILFGEEDVRVANLKPRISFNFFVTAPKNVSDIIPRTEVEKAIRMSRSRINDAFRLNDNSLEFLGIQPTLGESKYGPPCPPCPAPEFLGGPSVFLFPPKPKDTLYITREPEVTCVVVDVSQEDPEVQFNWYVDGVEVHNAKTKPREEQFNSTYRVVSVLTVLHQDWLNGKEYKCKVSNKGLPSSIEKTISKAKGQPREPQVYTLPPSQEEMTKNQVSLTCLVKGFYPSDIAVEWESNGQPENNYKTTPPVLDSDGSFFLYSRLTVDKSRWQEGNVFSCSVMHEALHNHYTQKSLSLSLGK

SEQ ID NO: 94 - protein, 952 aa, artificial
  ACE2 18-740 with IgG4 YTE
QSTIEEQAKTFLDKFNHEAEDLFYQSSLASWNYNTNITEENVQNMNNAGDKWSAFLKEQSTLAQMYPLQEIQNLTVKLQLQALQQNGSSVLSEDKSKRLNTILNTMSTIYSTGKVCNPDNPQECLLLEPGLNEIMANSLDYNERLWAWESWRSEVGKQLRPLYEEYVVLKNEMARANHYEDYGDYWRGDYEVNGVDGYDYSRGQLIEDVEHTFEEIKPLYEHLHAYVRAKLMNAYPSYISPIGCLPAHLLGDMWGRFWTNLYSLTVPFGQKPNIDVTDAMVDQAWDAQRIFKEAEKFFVSVGLPNMTQGFWENSMLTDPGNVQKAVCHPTAWDLGKGDFRILMCTKVTMDDFLTAHHEMGHIQYDMAYAAQPFLLRNGANEGFHEAVGEIMSLSAATPKHLKSIGLLSPDFQEDNETEINFLLKQALTIVGTLPFTYMLEKWRWMVFKGEIPKDQWMKKWWEMKREIVGVVEPVPHDETYCDPASLFHVSNDYSFIRYYTRTLYQFQFQEALCQAAKHEGPLHKCDISNSTEAGQKLFNMLRLGKSEPWTLALENVVGAKNMNVRPLLNYFEPLFTWLKDQNKNSFVGWSTDWSPYADQSIKVRISLKSALGDKAYEWNDNEMYLFRSSVAYAMRQYFLKVKNQMILFGEEDVRVANLKPRISFNFFVTAPKNVSDIIPRTEVEKAIRMSRSRINDAFRLNDNSLEFLGIQPTLGPPNQPPVSESKYGPPCPPCPAPEFLGGPSVFLFPPKPKDTLYITREPEVTCVVVDVSQEDPEVQFNWYVDGVEVHNAKTKPREEQFNSTYRVVSVLTVLHQDWLNGKEYKCKVSNKGLPSSIEKTISKAKGQPREPQVYTLPPSQEEMTKNQVSLTCLVKGFYPSDIAVEWESNGQPENNYKTTPPVLDSDGSFFLYSRLTVDKSRWQEGNVFSCSVMHEALHNHYTQKSLSLSLGK
